(19) United States
(12) Patent Application Publication
(10) Pub. No.: US 2012/0258126 A1
(43) Pub. Date: Oct. 11, 2012

(54) Molecular Vaccines for Infectious Disease

(75) Inventors: Jørgen Schøller, Lyngby (DK); Henrik Pedersen, Bagsvaerd (DK); Liselotte Brix, Bagsvaerd (DK)

(73) Assignee: DAKO DENMARK A/S, Glostrup (DK)

(21) Appl. No.: 13/122,007

(22) PCT Filed: Oct. 2, 2009
(86) PCT No.: PCT/DK09/50262

§ 371 Date: Jun. 29, 2012

Related U.S. Application Data
(60) Provisional application No. 61/102,126, filed on Oct. 2, 2008.

(30) Foreign Application Priority Data
Oct. 2, 2008 (DK) PA 2008 01 384

(51) Int. Cl. A61K 39/21; A61P 31/18; A61P 31/04; A61K 39/02

(52) U.S. Cl. 424/186.1; 424/190.1

(57) ABSTRACT

The present invention relates to methods for construction of pharmamers i.e. vaccine components characterized by their multimerization domain and the attached biologically active molecules, and their use in preparation of vaccines that contains the pharmamers alone or in combination with other molecules. The individual molecules of the construct can be bound to each other or the multimerization domain(s) by covalent or non-covalent bonds, directly or via linkers. The invention further relates to the use of such preparations in vaccine settings aimed to function as preventive/prophylactic or therapeutic vaccines in humans and animals.

[0001] All patent and non-patent references cited in the present application are hereby incorporated by reference in their entirety. The content of PCT/D2002/000169 is hereby incorporated by reference in this application.

[0002] The Danish patent application PA 2008 01384, and the U.S. provisional patent application U.S. 61/102,126 are hereby incorporated by reference in its entirety.

[0003] All patent and non-patent references cited in PA 2008 01384, and U.S. 61/102,126, or in the present application, are also hereby incorporated by reference in their entirety.

[0004] The European patent application EP 09154516.0, the PCT patent applications PCT/DK2009/050185 and PCT/DK2008/050167 are hereby incorporated by reference in its entirety.

[0005] All patent and non-patent references cited in EP 09154516.0, PCT/DK2009/050185 and PCT/DK2008/050167, are also hereby incorporated by reference in their entirety.

### FIELD OF INVENTION

[0006] The present invention relates to methods for construction of pharmamers i.e. vaccine components characterized by their multimerization domain and the attached biologically active molecules, and their use in preparation of vaccines that contains the pharmamers alone or in combination with other molecules. The individual molecules of the construct can be bound to each other or the multimerization domain(s) by covalent or non-covalent bonds, directly or via linkers. In one embodiment the one or more pharmamers comprises one or more MHC multimers disclosed in PCT/D2002/000169. Some of the molecules in the vaccine may be free i.e. non-attached to the pharmamer itself. The invention further relates to the use of such preparations in vaccine settings aimed to function as preventive/prophylactic or therapeutic vaccines in humans and animals.

### BACKGROUND OF INVENTION

[0007] By having functional molecules coupled to the vaccine antigen(s) as in pharmamers presentation of the antigen(s) to the immune system may be directed, enforced or otherwise modified. This can be accomplished by directing the antigens to specific antigen presenting cells by means of co-coupled receptor molecules or ligands.

### SUMMARY OF INVENTION

[0008] The present invention relates to a composition for vaccination and/or immune monitoring of a vaccine response comprising one or more pharmamers.

[0009] In another embodiment the present invention relates to a method of making the composition for vaccination and/or immune monitoring of a vaccine response comprising one or more pharmamers.

[0010] This invention also relates to a method for vaccination comprising administration to an individual in need thereof an effective amount of a composition comprising one or more pharmamers.

[0011] The invention further relates to a method for monitoring a vaccine response comprising use of the composition comprising one or more pharmamers.

[0012] In a further aspect the invention relates to a kit-of-parts comprising a composition comprising one or more pharmamers and use for this kit-of-parts for vaccination of an individual in need thereof or for monitoring of a vaccine response.

[0013] In one embodiment the present invention relates to methods for construction of pharmamers characterized by their multimerization domain and the attached biologically active molecules, and their use in preparation of vaccines that contains the pharmamers alone or in combination with other molecules.

### DEFINITIONS

[0014] Adjuvant: As used herein, the term “adjuvant” refers to an immunological adjuvant. By this is meant a compound that is able to enhance or facilitate the immune system's response to the ingredient in question, thereby inducing an immune response or series of immune responses in the subject. The adjuvant can facilitate the effect of the therapeutic composition by forming depots (prolonging the half-life of the ingredient), provide additional T-cell help and stimulate cytokine production. Facilitation of antigen survival and unspecific stimulation by adjuvants may, in some cases, be required if the antigenic molecule epitopes or functional molecules of the pharmamer are only weakly antigenic or only exerts weak to moderate interactions with compounds, molecules, or cells of the immune system.

[0015] Antibodies: As used herein, the term “antibody” means an isolated or recombinant binding agent that comprises the necessary variable region sequences to specifically bind an antigenic epitope. Therefore, an antibody is any form of antibody or fragment thereof that exhibits the desired biological activity, e.g., binding the specific target antigen. Antibodies can derive from multiple species. For example, antibodies include rodent (such as mouse and rat), rabbit, sheep, camel, and human antibodies. Antibodies can also include chimeric antibodies, which join variable regions from one species to constant regions from another species. Likewise, antibodies can be humanized, that is constructed by recombinant DNA technology to produce immunoglobulins which have human framework regions from one species combined with complementarity determining regions (CDR's) from a another species' immunoglobulin. The antibody can be monoclonal or polyclonal. Antibodies can be divided into isotypes (IgA, IgG, IgM, IgD, IgE, IgG1, IgG2, IgG3, IgG4, IgA1, IgA2, IgM1, IgM2). In another embodiment the term “antibody” refers to an intact antibody, or a fragment of an antibody that competes with the intact antibody for antigen binding. In certain embodiments, antibody fragments are produced by recombinant DNA techniques. In certain embodiments, antibody fragments are produced by enzymatic or chemical cleavage of intact antibodies. Exemplary antibody fragments include, but are not limited to, Fab, Fab′, F(ab′)2, Fv, and scFv. Exemplary antibody fragments also include, but are not limited to, domain antibodies, nanobodies, minibodies ((scFv-CH₃)₂), maxibodies ((scFv-CH₂—CH₃)₂), diabodies (noncovalent dimer of scFv).

[0016] Antigen presenting cell: An antigen-presenting cell (APC) as used herein is a cell that displays foreign antigen complexed with MHC on its surface.

[0017] Antigenic peptide: Any peptide molecule that is bound to or able to bind into the binding groove of either MHC I or MHC II molecules.

[0018] Avidin: Avidin as used herein is a glycoprotein found in the egg white and tissues of birds, reptiles and amphibians. It contains four identical subunits having a combined mass of 67,000-68,000 daltons. Each subunit consists of 128 amino acids and binds one molecule of biotin.

[0019] Biologically active molecules: Any molecule having biological activity. Biologically active molecules of the present invention may be attached to pharmamers, adjuvants, other biologically active molecules and/or vaccine enhancers by covalent or non-covalent interaction or they may be individual component(s) of the composition. Biologically active molecules in a pharmamer affect the binding characteristics and/or the effects of the pharmamer.

[0020] Biotin: Biotin, as used herein, is also known as vitamin H or B₇. Biotin has the chemical formula C₁₀H₁₆N₂O₃S.

[0021] Covalent binding: The term covalent binding is used herein to describe a form of chemical bonding that is characterized by the sharing of pairs of electrons between atoms. Attraction-to-repulsion stability that forms between atoms when they share electrons is known as covalent bonding.

[0022] Crosslinking: Crosslinking is the process of chemically joining two or more molecules by a covalent bond. Crosslinking reagents contain reactive ends to specific functional groups (primary amines, sulfhydryls, etc.) on proteins or other molecules.

[0023] Dendritic cell: The term dendritic cell as used herein is a type of immune cells. Their main function is to process antigen material and present it on the surface to other cells of the immune system, thus functioning as antigen-presenting cells.

[0024] Immunologically active molecules: Immunologically active molecule is used interchangeably herein with immuno active molecule and is any molecule that as an active part of the pharmamer, pharmamer composition, vaccine or therapeutics is modulating the immuno-activity of the pharmamer, pharmamer composition, vaccine or therapeutics itself or the immune system as such.

[0025] Carrier: A carrier as used herein can be any type of molecule that is directly or indirectly associated with a biologically active molecule. A carrier may link biologically active molecules to multimerisation domains and/or be a multimerisation domain itself.

[0026] Dextran: the term dextran as used herein is a complex, branched polysaccharide made of many glucose molecules joined into chains of varying lengths. The straight chain consists of α1->6 glycosidic linkages between glucose molecules, while branches begin from α1->3 linkages (and in some cases, α1->2 and α1->4 linkages as well).

[0027] Linker molecule: Linker molecule and linker is used interchangeable herein. A linker molecule is a molecule that covalently or non-covalently connects two or more molecules, thereby creating a larger complex consisting of all molecules including the linker molecule.

[0028] Liposomes: The term liposome as used herein is defined as a spherical vesicle with a membrane composed of a phospholipid and cholesterol bilayer. Liposomes, usually but not by definition, contain a core of aqueous solution; lipid spheres that contain no aqueous material are called micelles.

[0029] MHC: Denotes the major histocompatibility complex.

[0030] A “MHC Class I molecule” as used everywhere herein is defined as a molecule which comprises 1-3 subunits, including a heavy chain, a heavy chain combined with a light chain (beta₂m), a heavy chain combined with a light chain (beta₂m) through a flexible linker, a heavy chain combined with a peptide, a heavy chain combined with a peptide through a flexible linker, a heavy chain/beta₂m dimer combined with a peptide, and a heavy chain/beta₂m dimer with a peptide through a flexible linker to the heavy or light chain. The MHC molecule chain can be changed by substitution of single or by cohorts of native amino acids or by inserts, or deletions to enhance or impair the functions attributed to said molecule. By example, it has been shown that substitution of XX with YY in position nn of human beta₂m enhance the biochemical stability of MHC Class I molecule complexes and thus can lead to more efficient antigen presentation of subdominant peptide epitopes.

[0031] MHC complex: MHC complex is herein used interchangeably with MHC-peptide complex, unless it is specified that the MHC complex is empty, i.e. is not complexed with peptide.

[0032] MHC Class I like molecules (including non-classical MHC Class I molecules) include CD1d, HLA E, HLA G, HLA F, HLA H, MIC A, MIC B, ULBP-1, ULBP-2, and ULBP-3.

[0033] A “MHC Class II molecule” as used everywhere herein is defined as a molecule which comprises 2-3 subunits including an alpha-chain and a beta-chain (alpha/beta-dimer), an alpha/beta dimer with a peptide, and an alpha/beta dimer combined with a peptide through a flexible linker to the alpha or beta chain, an alpha/beta dimer combined through an interaction by affinity tags e.g. jun-fos, an alpha/beta dimer combined through an interaction by affinity tags e.g. jun-fos and further combined with a peptide through a flexible linker to the alpha or beta chain. The MHC molecule chains can be changed by substitution of single or by cohorts of native amino acids or by inserts, or deletions to enhance or impair the functions attributed to said molecule. Under circumstances where the alpha-chain and beta-chain have been fused, to form one subunit, the “MHC Class II molecule” can comprise only 1 subunit.

[0034] MHC Class II like molecules (including non-classical MHC Class II molecules) include HLA DM, HLA DO, I-A beta2, and I-E beta2.

[0035] “MHC complexes” and “MHC constructs” are used interchangably herein.

[0036] “MHC protein” and “MHC molecule” are used interchangably herein. Accordingly, a functional MHC peptide complex comprises a MHC protein or MHC molecule associated with a peptide to be presented for cells or binding partners having an affinity for said peptide.

[0037] By the terms “MHC complexes” and “MHC multimers” as used herein are meant such complexes and multimers thereof, which are capable of performing at least one of the functions attributed to said complex or multimer. The terms include both classical and non-classical MHC complexes. The meaning of “classical” and “non-classical” in connection with MHC complexes is well known to the person skilled in the art. Non-classical MHC complexes are subgroups of MHC-like complexes. The term “MHC complex” includes MHC Class I molecules, MHC Class II molecules, as well as MHC-like molecules (both Class I and Class II), including the subgroup non-classical MHC Class I and Class II molecules.

[0038] The MHC molecule can suitably be a vertebrate MHC molecule such as a human, a mouse, a rat, a porcine, a bovine or an avian MHC molecule. Such MHC complexes from different species have different names. E.g. in humans, MHC complexes are denoted HLA. The person skilled in the art will readily know the name of the MHC complexes from various species.

[0039] MHC multimer: Any molecule complex comprising one or more MHC molecules held together by a multimerization domain. The attachment of MHC molecule to multimerization domain may be directly or in-directly via a linker and may be covalent or non-covalent.

[0040] Multimerization domain: A multimerization domain is a molecule, a complex of molecules, a cell, cell-like structure or a solid support, to which one or more biologically active molecules can be attached. A multimerization domain may consist of one or more carriers and/or one or more scaffolds and may also contain one or more linkers connecting carrier to scaffold, carrier to carrier, scaffold to scaffold. Multimerization domains thus include polymers, proteins (e.g. IgG, streptavidin, TCR, scaffold proteins) micelles, cells, beads, other types of solid support, small organic molecules carrying reactive groups or carrying chemical motifs that can bind biologically active molecules or any other type of multimerization domain as described elsewhere herein.

[0041] Non-covalent: The term noncovalent bond as used herein is a type of chemical bond, that does not involve the sharing of pairs of electrons, but rather involves more dispersed variations of electromagnetic interactions.

[0042] Nonsense peptide: A peptide that binds efficiently to the peptide binding groove of MHC protein, but that does not support binding of the resultant MHC-peptide complex to desired TCR

[0043] “One or more” as used everywhere herein is intended to include one and a plurality.

[0044] Pharmamer: Molecule or molecule complex comprising one or more multimerisation domain(s) and one or more biologically active molecules.

[0045] “A plurality” as used everywhere herein should be interpreted as two or more.

[0046] Streptavidin: Streptavidin as used herein is a tetrameric protein purified from the bacterium Streptomyces avidinii. Streptavidin is widely use in molecular biology through its extraordinarily strong affinity for biotin.

[0047] Vaccine: As used herein the term vaccine is used for an antigenic preparation used to establish partial or total immunity to a disease or illness and thereby protecting, curing or treating the body from a specific disease or illness. Vaccines are either prophylactic and prevent disease or therapeutic and treat disease. Vaccines may contain more than one type of antigen and is then called a combined vaccine.

[0048] Vaccination: The introduction of vaccine into the body of human or animals for the purpose of inducing immunity.

[0049] Treatment: As used herein, the term “treatment” refers to prophylactic, ameliorating, therapeutic or curative treatment.

### FIGURE LEGENDS

[0050] FIG. 1: List of HLA Class 1 alleles of particular interest of the present invention. From http://www.anthonynolan.org.uk/HIG/lists/class1list.html, 2007

[0051] FIG. 2: List of HLA Class 2 alleles of particular interest of the present invention. From http://hla.alleles.org/alleles/class2.html, 2009

[0052] FIG. 3:

[0053] (A) Immunization schedule used in rhesus macaques and challenge with SHIVSF162.P4 grown in C8166-CCR5⁺ T cells (HLA-A*01, DRB1*04), (B) vaccine components in the 4 immunized groups and control, (C) dose and molecular ratio of the 4 constructs used to produce the 4 vaccines. Recombinant HLA class I proteins used: A*01, A*02, A*03, A*11, recombinant HLA class II: DRB1*04, HSP70₃₅₉₋₆₀₉. All components were biotinylated and linked to streptavidin-bound dextran (total 162 mg). Groups 1, 2 and 3 received full vaccine doses (SC) at the first immunization and half the dose in the 2^{nd}, 3^{rd} and 4^{th} immunizations, with Titermax (0.5 ml). Group 5 animals received the same vaccine as group 2 but without Titermax and full vaccine doses at all 4 immunizations administered IM.

[0054] FIG. 4:

[0055] (A) Peak viral load (log 10), (B) Cumulative viral load (log 10) over 10 weeks (area under curve) for each animal in the 4 immunized (groups 1, 2, 3 and 5) and unimmunized (group 4), (C) Viral load of group 2 () compared with the unimmunized group 4 (◯) macaques (mean±sem); One-way Anova: (A) F=3.325, p=0.0054; (B) F=3.9745, p=0.0096, ¶ p<0.05 between group 2 and 4 in A and B. * p<0.05, ** p<0.01

[0056] FIG. 5:

[0057] 4 Effect of Immunization on induction of serum antibodies (1:1000 dilution) to HLA class I A1, A2, A3, A11, A24 and DR4 in 4 groups of macaques: group 1 (▪ HLA class I, II, HSP70 and Titermax), group 2 (◯ HLA class I, II, HIV gp140, SIV gp27, HSP70 and Titermax), group 3 ( [symbol] HIV gp140, SIV p27, HSP70 and Titermax) and group 5 (▴ HLA class I, II, HIVgp140, SIVp27 and HSP70. Cross-reactivity between: * A1, A2 and A11, ** A3 and A24

[0058] FIG. 6:

[0059] Correlation between the Luminex HLA multibead antibody (LHMA) assay for HLA-class 2 and class 1 and specific antibodies induced by immunization with HLA-DR4 and HLA-A*02, respectively

[0060] FIG. 7:

[0061] Serum neutralizing activity (IC50) in the 5 groups of macaques after the last immunization. (A) Complement dependent, (B) Complement independent, (C) correlation with peak viral load, (D) correlation with cumulative loads; □ Group1, ▪ Group2, ▴ Group3, ◯ Group4, ♦ Group5

[0062] FIG. 8: Amino acid sequence of a monomer gp140 molecule comprising biotinylation tag and oligomerization domain enabling biotinylation and trimer formation respectively.

[0063] FIG. 9: Amino acid sequence of Siv p27 encoded by the Gag gene of SIV.

[0064] FIG. 10: Examples of useful reactive groups comprised in multimerization domains and/or biologically active molecules of the present invention.

### DETAILED DESCRIPTION OF THE INVENTION

[0065] The present invention relates to a composition comprising one or more pharmamers. Pharmamers are molecules or molecule complexes characterised by having one or more multimerisation domains whereto one or more biologically active molecules are attached either directly or through a linker. The biologically active molecules may also themselves comprise one or more multimerisation domains.

[0066] Other components may also be attached to the pharmamer in order to broaden, increase, decrease or otherwise modify the binding of and/or effect of the pharmamer.

[0067] In another embodiment the invention relates to compositions comprising one or more pharmamers and additionally comprises one or more adjuvant(s), one or more vaccine enhance(s) and/or one or more biologically active molecules not attached to the pharmamer construct. These other molecules may broaden, increase, decrease or otherwise modify the binding, effect or uptake of the pharmamer construct(s) or may have an effect themselves affecting the overall effect of the composition.

[0068] In one embodiment the present invention relates to methods for construction of pharmamers and for making compositions comprising one or more pharmamers.

[0069] In another embodiment the present invention relates to the use of compositions comprising one or more pharmamers for vaccination of an individual in need thereof. Compositions of pharmamers may be used for prophylactic vaccination of individuals to protect the individual against e.g. viral disease, bacterial disease, parasitic disease, cancer disease, autoimmune disease, allergy or other diseases.

[0070] Pharmamer compositions may also be used for therapeutic vaccination in order to cure, alleviate or prevent/delay progression of one or more diseases e.g. viral disease, bacterial disease, parasitic disease, cancer disease, autoimmune disease, allergy or other diseases.

[0071] In the following pharmamers and compositions comprising pharmamers are described in more detail.

### Design, Generation and Use of Pharmamers

[0072] As used in the description of this invention, the term “pharmamers” will be used to describe any molecule or molecule complex where the number of involved molecules or molecule complexes is larger than one, and where these components are held together in a large complex by covalent or non-covalent interactions to the multimerization domain and/or between the individual components. The components can be identical or different molecules or molecular complexes.

[0073] Example, organic molecule-based pharmamers include functionalized cyclic structures such as benzene rings where e.g. a benzene ring is functionalized and covalently linked to e.g. three immunologically active molecules; example, cell-based pharmamers include dendritic cells and antigen presenting cells (APCs); example, membrane-based pharmamers include liposomes and micelles carrying immunologically active molecules or complexes in their membranes; example, polymer-based pharmamers include molecule constructs where immunologically active molecules or complexes are bound covalently or non-covalently to a dextran backbone/multimerisation domain and; example, particles include beads or other solid supports with immunologically active molecules immobilized on the surface. Obviously, any kind of multimerization domain can be used, including any kind of cell, polymer, protein or other molecular structure, or particles and solid supports.

[0074] Different approaches can be taken to attach or assemble the various components of a pharmamer, i.e. the biologically active molecules and the multimerization domain(s). This can be done by chemical reactions between reactive groups of the multimerization domain and reactive groups on a immunologically active protein, or by non-covalent interaction between a part of the immunologically active protein (e.g. a biotinylated peptide component) and the multimerization domain (e.g. four binding sites for biotin on the strepavidin tetrameric protein). As an alternative, the pharmamer can be formed by the non-covalent association of amino acid helices fused to one component of immunologically active protein, to form a pentameric pharmamer, held together by five helices in a coiled-coil structure making up the multimerization domain.

[0075] Appropriate chemical reactions for the covalent coupling of molecules or molecular complexes to the multimerization domain include nucleophilic substitution by activation of electrophiles (e.g. acylation such as amide formation, pyrazolone formation, isoxazolone formation; alkylation; vinylation; disulfide formation), addition to carbon-hetero multiple bonds (e.g. alkene formation by reaction of phosphonates with aldehydes or ketones; arylation; alkylation of arenes/hetarenes by reaction with alkyl boronates or enolethers), nucleophilic substitution using activation of nucleophiles (e.g. condensations; alkylation of aliphatic halides or tosylates with enolethers or enamines), and cycloadditions.

[0076] Appropriate molecules, capable of providing non covalent interactions between the multimerization domain and the immunologically and/or biologically active molecules or complexes hereof involve the following molecule pairs and molecules: streptavidin/biotin, avidin/biotin, antibody/antigen, DNA/DNA, DNA/PNA, DNA/RNA, PNA/PNA, LNA/DNA, leucine zipper e.g. Fos/Jun, IgG dimeric protein, IgM multivalent protein, acid/base coiled-coil helices, chelate/metal ion-bound chelate, streptavidin (SA) and avidin and derivatives thereof, biotin, immunoglobulins, antibodies (monoclonal, polyclonal, and recombinant), antibody fragments and derivatives thereof, leucine zipper domain of AP-1 (jun and fos), hexa-his (metal chelate moiety), hexa-hat GST (glutathione S-transferase) glutathione affinity, Calmodulin-binding peptide (CBP), Strep-tag, Cellulose Binding Domain, Maltose Binding Protein, S-Peptide Tag, Chitin Binding Tag, Immuno-reactive Epitopes, Epitope Tags, E2Tag, HA Epitope Tag, Myc Epitope, FLAG Epitope, AU1 and AU5 Epitopes, Glu-Glu Epitope, KT3 Epitope, IRS Epitope, Btag Epitope, Protein Kinase-C Epitope, VSV Epitope, lectins that mediate binding to a diversity of compounds, including carbohydrates, lipids and proteins, e.g. Con A (Canavalia ensiformis) or WGA (wheat germ agglutinin) and tetranectin or Protein A or G (antibody affinity). Combinations of such binding entities are also comprised. In particular, when the MHC complex is tagged, the binding entity can be an “anti-tag”. By “anti-tag” is meant an antibody binding to the tag and any other molecule capable of binding to such tag.

[0077] In one embodiment the present invention relates to a vaccine composition comprising one or more pharmamers, wherein the one or more pharmamers has a molecular weight in the range 50,000 Da to 5,000,000 Da, such as from 50,000 Da to 100,000 Da, for example from 100,000 Da to 200,000 Da, such as from 200,000 Da to 300,000 Da, for example from 300,000 Da to 400,000 Da, such as from 400,000 Da to 500,000 Da, for example from 500,000 Da to 600,000 Da, such as from 600,000 Da to 700,000 Da, for example from 700,000 Da to 800,000 Da, such as from 800,000 Da to 900,000 Da, for example from 900,000 Da to 1,000,000 Da, such as from 1,000,000 Da to 1,200,000 Da, for example from 1,200,000 Da to 1,400,000 Da, such as from 1,400,000 Da to 1,600,000 Da, for example from 1,600,000 Da to 1,800,000 Da, such as from 1,800,000 Da to 2,000,000 Da, for example from 2,000,000 Da to 2,200,000 Da, such as from 2,200,000 Da to 2,400,000 Da, for example from 2,400,000 Da to 2,600,000 Da, such as from 2,600,000 Da to 2,800,000 Da, for example from 2,800,000 Da to 3,000,000 Da, such as from 3,000,000 Da to 3,200,000 Da, for example from 3,200,000 Da to 3,400,000 Da, such as from 3,400,000 Da to 3,600,000 Da, for example from 3,600,000 Da to 3,800,000 Da, such as from 3,800,000 Da to 4,000,000 Da, for example from 4,000,000 Da to 4,200,000 Da, such as from 4,200,000 Da to 4,400,000 Da, for example from 4,400,000 Da to 4,600,000 Da, such as from 4,600,000 Da to 4,800,000 Da, for example from 4,800,000 Da to 5,000,000 Da.

[0078] In another embodiment the present invention relates to a vaccine composition comprising one or more pharmamers, wherein the one or more pharmamers has an average molecular weight in the range 50,000 Da to 5,000,000 Da, such as from 50,000 Da to 4,000,000 Da; such as from 50,000 Da to 3,000,000 Da; such as from 50,000 Da to 2,000,000; such as from 50,000 Da and 1,000,000 Da, such as from 50,000 Da to 980,000; for example from 50,000 Da to 960,000; such as from 50,000 Da to 940,000; for example from 50,000 Da to 920,000; such as from 50,000 Da to 900,000; for example from 50,000 Da to 880,000; such as from 50,000 Da to 860,000; for example from 50,000 Da to 840,000; such as from 50,000 Da to 820,000; for example from 50,000 Da to 800,000; such as from 50,000 Da to 780,000; for example from 50,000 Da to 760,000; such as from 50,000 Da to 740,000; for example from 50,000 Da to 720,000; such as from 50,000 Da to 700,000; for example from 50,000 Da to 680,000; such as from 50,000 Da to 660,000; for example from 50,000 Da to 640,000; such as from 50,000 Da to 620,000; for example from 50,000 Da to 600,000; such as from 50,000 Da to 580,000; for example from 50,000 Da to 560,000; such as from 50,000 Da to 540,000; for example from 50,000 Da to 520,000; such as from 50,000 Da to 500,000; for example from 50,000 Da to 480,000; such as from 50,000 Da to 460,000; for example from 50,000 Da to 440,000; such as from 50,000 Da to 420,000; for example from 50,000 Da to 400,000; such as from 50,000 Da to 380,000; for example from 50,000 Da to 360,000; such as from 50,000 Da to 340,000; for example from 50,000 Da to 320,000; such as from 50,000 Da to 300,000; for example from 50,000 Da to 280,000; such as from 50,000 Da to 260,000; for example from 50,000 Da to 240,000; such as from 50,000 Da to 220,000; for example from 50,000 Da to 200,000; such as from 50,000 Da to 180,000; for example from 50,000 Da to 160,000; such as from 50,000 Da to 140,000; for example from 50,000 Da to 120,000; such as from 50,000 Da to 100,000; for example from 50,000 Da to 80,000; such as from 50,000 Da to 60,000; such as from 100,000 Da to 980,000; for example from 100,000 Da to 960,000; such as from 100,000 Da to 940,000; for example from 100,000 Da to 920,000; such as from 100,000 Da to 900,000; for example from 100,000 Da to 880,000; such as from 100,000 Da to 860,000; for example from 100,000 Da to 840,000; such as from 100,000 Da to 820,000; for example from 100,000 Da to 800,000; such as from 100,000 Da to 780,000; for example from 100,000 Da to 760,000; such as from 100,000 Da to 740,000; for example from 100,000 Da to 720,000; such as from 100,000 Da to 700,000; for example from 100,000 Da to 680,000; such as from 100,000 Da to 660,000; for example from 100,000 Da to 640,000; such as from 100,000 Da to 620,000; for example from 100,000 Da to 600,000; such as from 100,000 Da to 580,000; for example from 100,000 Da to 560,000; such as from 100,000 Da to 540,000; for example from 100,000 Da to 520,000; such as from 100,000 Da to 500,000; for example from 100,000 Da to 480,000; such as from 100,000 Da to 460,000; for example from 100,000 Da to 440,000; such as from 100,000 Da to 420,000; for example from 100,000 Da to 400,000; such as from 100,000 Da to 380,000; for example from 100,000 Da to 360,000; such as from 100,000 Da to 340,000; for example from 100,000 Da to 320,000; such as from 100,000 Da to 300,000; for example from 100,000 Da to 280,000; such as from 100,000 Da to 260,000; for example from 100,000 Da to 240,000; such as from 100,000 Da to 220,000; for example from 100,000 Da to 200,000; such as from 100,000 Da to 180,000; for example from 100,000 Da to 160,000; such as from 100,000 Da to 140,000; for example from 100,000 Da to 120,000; such as from 150,000 Da to 980,000; for example from 150,000 Da to 960,000; such as from 150,000 Da to 940,000; for example from 150,000 Da to 920,000; such as from 150,000 Da to 900,000; for example from 150,000 Da to 880,000; such as from 150,000 Da to 860,000; for example from 150,000 Da to 840,000; such as from 150,000 Da to 820,000; for example from 150,000 Da to 800,000; such as from 150,000 Da to 780,000; for example from 150,000 Da to 760,000; such as from 150,000 Da to 740,000; for example from 150,000 Da to 720,000; such as from 150,000 Da to 700,000; for example from 150,000 Da to 680,000; such as from 150,000 Da to 660,000; for example from 150,000 Da to 640,000; such as from 150,000 Da to 620,000; for example from 150,000 Da to 600,000; such as from 150,000 Da to 580,000; for example from 150,000 Da to 560,000; such as from 150,000 Da to 540,000; for example from 150,000 Da to 520,000; such as from 150,000 Da to 500,000; for example from 150,000 Da to 480,000; such as from 150,000 Da to 460,000; for example from 150,000 Da to 440,000; such as from 150,000 Da to 420,000; for example from 150,000 Da to 400,000; such as from 150,000 Da to 380,000; for example from 150,000 Da to 360,000; such as from 150,000 Da to 340,000; for example from 150,000 Da to 320,000; such as from 150,000 Da to 300,000; for example from 150,000 Da to 280,000; such as from 150,000 Da to 260,000; for example from 150,000 Da to 240,000; such as from 150,000 Da to 220,000; for example from 150,000 Da to 200,000; such as from 150,000 Da to 180,000; for example from 150,000 Da to 160,000.

[0079] The present invention further relates to a vaccine composition comprising one or more pharmamers, wherein the one or more pharmamers has an average molecular weight in the range 50,000 Da to 5,000,000 Da, such as from 50,000 Da to 100,000 Da, for example from 100,000 Da to 200,000 Da, such as from 200,000 Da to 300,000 Da, for example from 300,000 Da to 400,000 Da, such as from 400,000 Da to 500,000 Da, for example from 500,000 Da to 600,000 Da, such as from 600,000 Da to 700,000 Da, for example from 700,000 Da to 800,000 Da, such as from 800,000 Da to 900,000 Da, for example from 900,000 Da to 1,000,000 Da, such as from 1,000,000 Da to 1,200,000 Da, for example from 1,200,000 Da to 1,400,000 Da, such as from 1,400,000 Da to 1,600,000 Da, for example from 1,600,000 Da to 1,800,000 Da, such as from 1,800,000 Da to 2,000,000 Da, for example from 2,000,000 Da to 2,200,000 Da, such as from 2,200,000 Da to 2,400,000 Da, for example from 2,400,000 Da to 2,600,000 Da, such as from 2,600,000 Da to 2,800,000 Da, for example from 2,800,000 Da to 3,000,000 Da, such as from 3,000,000 Da to 3,200,000 Da, for example from 3,200,000 Da to 3,400,000 Da, such as from 3,400,000 Da to 3,600,000 Da, for example from 3,600,000 Da to 3,800,000 Da, such as from 3,800,000 Da to 4,000,000 Da, for example from 4,000,000 Da to 4,200,000 Da, such as from 4,200,000 Da to 4,400,000 Da, for example from 4,400,000 Da to 4,600,000 Da, such as from 4,600,000 Da to 4,800,000 Da, for example from 4,800,000 Da to 5,000,000 Da.

[0080] The present invention further relates to a vaccine composition comprising one or more pharmamers, wherein the one or more pharmamers has a molecular weight of at least 50,000 Da, such as at least 100,000 Da, for example at least 200,000 Da, such as at least 300,000 Da, for example at least 400,000 Da, such as at least 500,000 Da, for example at least 600,000 Da, such as at least 700,000 Da, for example at least 800,000 Da, such as at least 900,000 Da, for example at least 1,000,000 Da, such as at least 1,100,000 Da, for example at least 1,200,000 Da, such as at least 1,300,000 Da, for example at least 1,400,000 Da, such as at least 1,500,000 Da, for example at least 1,600,000 Da, such as at least 1,700,000 Da, for example at least 1,800,000 Da, such as at least 1,900,000 Da, for example at least 2,000,000 Da, such as at least 2,100,000 Da, for example at least 2,200,000 Da, such as at least 2,300,000 Da, for example at least 2,400,000 Da, such as at least 2,500,000 Da, for example at least 2,600,000 Da, such as at least 2,700,000 Da, for example at least 2,800,000 Da, such as at least 2,900,000 Da, for example at least 3,000,000 Da, such as at least 3,100,000 Da, for example at least 3,200,000 Da, such as at least 3,300,000 Da, for example at least 3,400,000 Da, such as at least 3,500,000 Da, for example at least 3,600,000 Da, such as at least 3,700,000 Da, for example at least 3,800,000 Da, such as at least 3,900,000 Da, for example at least 4,000,000 Da, such as at least 4,100,000 Da, for example at least 4,200,000 Da, such as at least 4,300,000 Da, for example at least 4,400,000 Da, such as at least 4,500,000 Da, for example at least 4,600,000 Da, such as at least 4,700,000 Da, for example at least 4,800,000 Da, such as at least 4,900,000 Da, for example at least 5,000,000 Da.

[0081] The present invention further relates to a vaccine composition comprising one or more pharmamers, wherein the one or more pharmamers has a molecular weight of less than 5,000,000 Da, such as less than 4,900,000 Da, for example less than 4,800,000 Da, such as less than 4,700,000 Da, for example less than 4,600,000 Da, such as less than 4,500,000 Da, for example less than 4,400,000 Da, such as less than 4,300,000 Da, for example less than 4,200,000 Da, such as less than 4,100,000 Da, for example less than 4,000,000 Da, such as less than 3,900,000 Da, for example less than 3,800,000 Da, such as less than 3,700,000 Da, for example less than 3,600,000 Da, such as less than 3,500,000 Da, for example less than 3,400,000 Da, such as less than 3,300,000 Da, for example less than 3,200,000 Da, such as less than 3,100,000 Da, for example less than 3,000,000 Da, such as less than 2,900,000 Da, for example less than 2,800,000 Da, such as less than 2,700,000 Da, for example less than 2,600,000 Da, such as less than 2,500,000 Da, for example less than 2,400,000 Da, such as less than 2,300,000 Da, for example less than 2,200,000 Da, such as less than 2,100,000 Da, for example less than 2,000,000 Da, such as less than 1,900,000 Da, for example less than 1,800,000 Da, such as less than 1,700,000 Da, for example less than 1,600,000 Da, such as less than 1,500,000 Da, for example less than 1,400,000 Da, such as less than 1,300,000 Da, for example less than 1,200,000 Da, such as less than 1,100,000 Da, for example less than 1,000,000 Da, such as less than 900,000 Da, for example less than 800,000 Da, such as less than 700,000 Da, for example less than 600,000 Da, such as less than 500,000 Da, for example less than 400,000 Da, such as less than 300,000 Da, for example less than 200,000 Da, such as less than 100,000 Da, for example less than 50,000 Da.

[0082] In one embodiment the present invention relates to a vaccine composition comprising more than 1 pharmamer, such as more than 2, 3, 4, 5, 6, 7, 8, 9, 10, 11, 12, 13, 14, 15, 16, 17, 18, 19, 20, 25, 30, 35, 40, 45, 50, 55, 60, 65, 70, 75, 80, 85, 90, 95, 100, 200, 300, 400, 500, 600, 700, 800, 900, 1,000, 2,000, 3,000, 4,000, 5,000, 6,000, 7,000, 8,000, 9,000, or more than 10,000 pharmamers.

[0083] In another embodiment the present invention relates to a vaccine composition comprising more than 2 different pharmamers, such as more than 3, 4, 5, 6, 7, 8, 9, 10, 11, 12, 13, 14, 15, 16, 17, 18, 19, 20, 25, 30, 35, 40, 45, 50, 55, 60, 65, 70, 75, 80, 85, 90, 95, 100, 200, 300, 400, 500, 600, 700, 800, 900, 1,000, 2,000, 3,000, 4,000, 5,000, 6,000, 7,000, 8,000, 9,000, or more than 10,000 different pharmamers.

[0084] In yet another embodiment the present invention relates to a vaccine composition comprising more than 2 identical pharmamers, such as more than 3, 4, 5, 6, 7, 8, 9, 10, 11, 12, 13, 14, 15, 16, 17, 18, 19, 20, 25, 30, 35, 40, 45, 50, 55, 60, 65, 70, 75, 80, 85, 90, 95, 100, 200, 300, 400, 500, 600, 700, 800, 900, 1,000, 2,000, 3,000, 4,000, 5,000, 6,000, 7,000, 8,000, 9,000, or more than 10,000 identical pharmamers.

[0085] In a further embodiment the present invention relates to a vaccine composition comprising less than 10,000 pharmamers, such as for example less than 9,000, 8,000, 7,000, 6,000, 5,000, 4,000, 3,000, 2,000, 1,000, 900, 800, 700, 600, 500, 400, 300, 200, 100, 95, 90, 85, 80, 75, 70, 65, 60, 55, 50, 45, 40, 35, 30, 25, 20, 15, 10, 9, 8, 7, 6, 5, 4, 3, or less than 2 pharmamers.

[0086] In a further embodiment the present invention relates to a vaccine composition comprising less than 10,000 different pharmamers, such as for example less than 9,000, 8,000, 7,000, 6,000, 5,000, 4,000, 3,000, 2,000, 1,000, 900, 800, 700, 600, 500, 400, 300, 200, 100, 95, 90, 85, 80, 75, 70, 65, 60, 55, 50, 45, 40, 35, 30, 25, 20, 15, 10, 9, 8, 7, 6, 5, 4, 3 or less than 2 different pharmamers.

[0087] In a further embodiment the present invention relates to a vaccine composition comprising less than 10,000 identical pharmamers, such as for example less than 9,000, 8,000, 7,000, 6,000, 5,000, 4,000, 3,000, 2,000, 1,000, 900, 800, 700, 600, 500, 400, 300, 200, 100, 95, 90, 85, 80, 75, 70, 65, 60, 55, 50, 45, 40, 35, 30, 25, 20, 15, 10, 9, 8, 7, 6, 5, 4, 3, or less than 2 identical pharmamers.

### Multimerisation Domains

[0088] The pharmamers of the invention in one embodiment comprise one or more multimerization domain(s). The multimerization domain(s) can be a soluble multimerization domain(s) or a not soluble multimerization domain(s). The multimerization domain(s) can be any such which enables attachment of the MHC molecules, the binding entities, and/or the biologically active compounds, while providing advantageous properties of the construct.

[0089] Examples of suitable multimerization domain(s)s are polysaccharides including dextrans, carboxy methyl dextran, dextran polyaldehyde, carboxymethyl dextran lactone, and cyclodextrins, pullulans, schizophyllan, scleroglucan, xanthan, gellan, O-ethylamino guaran, chitins and chitosans including 6-O-carboxymethyl chitin and N-carboxymethyl chitosan, derivatised cellolosics including carboxymethyl cellulose, carboxymethyl hydroxyethyl cellulose, hydroxy-ethyl cellulose, 6-amino-6-deoxy cellulose and O-ethyl-amine cellulose, hydroxylated starch, hydroxypropyl starch, hydroxyethyl starch, carrageenans, alginates, and agarose, synthetic polysaccharides including ficoll and carboxy-methylated ficoll, vinyl polymers including poly(acrylic acid), poly(acryl amides), poly(acrylic esters), poly(2-hydroxy ethyl methacrylate), poly(methyl methacrylate), poly(maleic acid), poly(maleic anhydride), poly(acrylamide), poly(ethyl-co-vinyl acetate), poly(methacrylic acid), poly(vinyl-alcohol), poly(vinyl alcohol-co-vinyl chloroacetate), aminated poly(vinyl alcohol), and co block polymers thereof, poly ethylene glycol (PEG) or polypropylene glycol or poly(ethylene oxide-co-propylene oxides) comprising polymer backbones including linear, comb-shaped or StarBurst dendrimers, poly amino acids including polylysines, polyglutamic acid, polyurethanes, poly(ethylene imines), pluriol, proteins including peptides, polypeptides, antigenbinding peptides, albumins, immunoglobulins, coiled-coil helixes e.g. Fos-Jun or Fos-Jun like or coiled-coiled dimers/trimers/tetramers/pentamers, Streptavidin, Avidin, Streptactin, T-cell receptors other protein receptors and virus-like proteins (VLP), and polynucleotides, DNA, RNA, PNA, LNA, oligonucleotides and oligonucleotide dendrimer constructs and small organic molecules including but not limited to steroids, peptides, linear or cyclic structures, aromatic structures, aliphatic structures.

[0090] Also included are cells e.g. dendritic cells, antigen presenting cell, B-cell, T-cell Macrophages, Kupfer cells, Langerhans cells, transfected cells expressing biologically active proteins, including hybridoma cells, yeast-cells, insect-cells, CHO cells, any cell biologically active molecules, cell-like structures e.g. micelles, liposomes, and phages e.g. filamentous phages and viral or viral-like particles.

[0091] Other suitable multimerization domains are solid supports including but not limited to beads, particulate matters and other surfaces.

[0092] Also included are self-assembling multimeric structures as described elsewhere herein.

[0093] Also included in this definition of the multimerization domain(s) is mixed forms, i.e. one or more multimerization domain(s) composed of one or more of the above examples. An example of this is dextran coupled with Streptavidin whereto biotinylated biologically active proteins can bind.

[0094] The choice of multimerization domain(s) depend i.e. on the application of the pharmamer. Of course, several parameters can be varied in the above-given examples of multimerization domain(s), including the length and branching. Furthermore, the multimerization domain(s) can carry various substitutions, including such, which can be protected and/or activated, enabling further derivatisation.

[0095] It is to be understood that the pharmamer construct of the invention can further comprise one or several different biologically active molecules in order to affect the characteristics of the constructs, e.g. with respect to binding properties, effects, antigenicity, specificity, solubility, stability, or detectability. For instance, spacing could be provided between the biologically active molecules.

[0096] One preferred embodiment of the present invention includes multimerisation domains made of Streptavidin or Avidin whereto biotin, biotin-like peptides or other biotin-like molecules can bind.

[0097] Another preferred embodiment includes dextran whereto biologically active molecules are attached directly through a linker as described elsewhere herein. The biologically active molecules can also be attached through a second multimerization domain or an entity as described elsewhere herein. Examples include but is not limited to divinylsulfone activated dextran whereto biologically active molecules are coupled directly e.g. through —SH group(s) or amine(s) in the biologically active molecules, dextran coupled with SA whereto biologically active molecules are attached through a biotin on the biologically active molecule, dextran with biologically active molecules are attached through a coiled-coil structure where on α-helix of a coiled-coil dimer is coupled to dextran and the other α-helix is coupled to the biologically active molecule e.g. as a fusion protein.

[0098] A preferred embodiment include beads or bead-like structures having an excluded volume (e.g. polysaccharide beads, polystyrene beads, magnetic polystyrene beads, polycarbamate beads, or any other kind of beads that can be dissolved or suspended in aqueous buffer) that carry electrophilic groups (e.g. divinyl sulfone activated polysaccharide, polystyrene beads that have been functionalized with tosyl-activated esters, magnetic polystyrene beads functionalized with tosyl-activated esters), and where biologically active molecules have been covalently immobilized to these by reaction of nucleophiles comprised within the biologically active molecule with the electrophiles of the beads.

[0099] In another preferred embodiment, the biologically active molecules described immediately above (where the one or more multimerization domain(s) is a bead) further comprises a flexible or rigid, and water soluble, linker that allows for the immobilized biologically active molecules to interact efficiently with surrounding cells and molecules. In another embodiment, the linker is cleavable, allowing for release of the biologically active molecules from the bead.

[0100] In another preferred embodiment the bead is covalently or non-covalently coated with pharmamers or single biologically active molecules, through non-cleavable or cleavable linkers. As an example, the bead can be coated with streptavidin monomers, which in turn are associated with biotinylated pharmamers; or the bead can be coated with streptavidin tetramers, each of which are associated with 0, 1, 2, 3, or 4 biotinylated biologically active molecules; or the bead can be coated with biologically active molecules where e.g. the reactive groups of the biologically active molecules (e.g. the divinyl sulfone-activated dextran backbone) has reacted with nucleophilic groups on the bead, to form a covalent linkage between the dextran of the dextramer and the beads.

[0101] A preferred embodiment including self-assembling multimeric structures are trimeric, tetrameric, pentameric, hexameric or heptameric coiled-coil structures holding together 3, 4, 5, 6 or 7 biologically active molecules. The coiled-coil structures may be attached to biologically active molecules through covalent or non-covalent bonds.

[0102] In some of the abovementioned embodiments, several multimerization domains (e.g. streptavidin tetramers bound to biotinylated biologically active molecules) are linked to another multimerization domain (e.g. the bead). For the purpose of the invention we shall call both the smaller and the bigger multimerization domain, as well as the combined multimerization domain, for multimerization domain.

[0103] In another preferred embodiment the one or more multimerization domain(s) can be any support capable of binding the biologically active molecules. Well-known supports or multimerization domains include glass, polystyrene, polypropylene, polyethylene, dextran, nylon, amylases, natural and modified celluloses, polyacrylamides, gabbros, and magnetite. The nature of the one or more multimerization domain(s) can be either soluble to some extent or insoluble for the purposes of the present invention. The support material can have virtually any possible structural configuration so long as the coupled molecule is capable of binding to the biologically active molecule. The support configuration can be spherical, as in a bead, or cylindrical, as in the inside surface of a test tube, or the external surface of a rod. Alternatively, the surface can be flat such as a sheet, test strip, a membrane, or a plastic surface.

[0104] In another preferred embodiment the multimerization domain(s) can be a polymer or an oligomer or a non-repeating moiety. The polymer or oligomer moiety can comprise repeat units consisting of a repeat moiety selected from alkyl (e.g., —CH₂—), substituted alkyl (e.g., —CHR—), alkenyl, substituted alkenyl, alkynyl, substituted alkynyl, phenyl, aryl, heterocyclic, amine, ether, sulfide, disulfide, hydrazine, and any of the foregoing substituted with oxygen, sulfur, sulfonyl, phosphonyl, hydroxyl, alkoxyl, amine, thiol, ether, carbonyl, carboxyl, ester, amide, alkyl, alkenyl, alkynyl, aryl, heterocyclic, as well as moieties comprising combinations thereof. Generally, a non-repeating multifunctional bridge moiety can be a moiety selected from alkyl, phenyl, aryl, alkenyl, alkynyl, heterocyclic, amine, ether, sulfide, disulfide, hydrazine, and any of the foregoing substituted with oxygen, sulfur, sulfonyl, phosphonyl, hydroxyl, alkoxyl, amine, thiol, ether, carbonyl, carboxyl, ester, amide, alkyl, alkenyl, alkynyl, aryl, heterocyclic, and moieties comprising combinations thereof (in each permutation). A non-repeating moiety can include repeating units (e.g., methylene) within portions or segments thereof without repeating as a whole.

[0105] The oligomer (or oligomer moiety) or the polymer (or polymer moiety), can generally be soluble or insoluble; can generally be a cross-linked oligomer (or oligomer moiety) or a cross-linked polymer (or polymer moiety); can generally be a homopolymer or a copolymer (including polymers having two monomer-repeat-units, terpolymers and higher-order polymers), including for example random copolymer moieties and block copolymer moieties; can generally include one or more ionic monomer moieties such as one or more anionic monomer moieties; can generally include one or more hydrophobic monomer moieties; can generally include one or more hydrophilic monomer moieties; and can generally include any of the foregoing features in combination.

[0106] The polymer moiety can be soluble or insoluble, existing for example as dispersed micelles or particles, such as colloidal particles or (insoluble) macroscopic beads. Polymer moieties can be hydrophobic, hydrophilic, amphiphilic, uncharged or non-ionic, negatively or positively charged, or a combination thereof, and can be organic or inorganic. Inorganic polymers, also referred to as inorganic multimerization domains in some cases, include silica (e.g., multi-layered silica), diatomaceous earth, zeolite, calcium carbonate, talc, and the like.

[0107] Suitable water-soluble polymers include polyethylene glycol (PEG), monomethoxy-PEG, mono-(C₁-C₁₀)alkoxy-PEG, aryloxy-PEG, poly-(N-vinyl pyrrolidone)PEG, tresyl monomethoxy PEG, PEG propionaldehyde, bis-succinimidyl carbonate PEG, propylene glycol homopolymers, a polypropylene oxide/ethylene oxide co-polymer, polyoxyethylated polyols (e.g., glycerol), polyvinyl alcohol, dextran, cellulose, or other carbohydrate-based polymers. A conjugate can also comprise a mixture of such water-soluble polymers.

[0108] Examples of polysaccharides useful in the present invention include materials from vegetal or animal origin, including cellulose materials, hemicellulose, alkyl cellulose, hydroxyalkyl cellulose, carboxymethylcellulose, sulfoethylcellulose, starch, xylan, amylopectine, chondroitin, hyarulonate, heparin, guar, xanthan, mannan, galactomannan, chitin, and/or chitosan.

[0109] The type of multimerization domain can also be selected from, but is not limited to, the group consisting of agarose, sepharose, resin beads, glass beads, pore-glass beads, glass particles coated with a hydrophobic polymer, chitosan-coated beads, SH beads, latex beads, spherical latex beads, allele-type beads, SPA bead, PEG-based resins, PEG-coated bead, PEG-encapsulated bead, polystyrene beads, magnetic polystyrene beads, glutathione agarose beads, magnetic bead, paramagnetic beads, protein A and/or protein G sepharose beads, activated carboxylic acid bead, macroscopic beads, microscopic beads, insoluble resin beads, silica-based resins, cellulosic resins, cross-linked agarose beads, polystyrene beads, cross-linked polyacrylamide resins, beads with iron cores, metal beads, dynabeads, Polymethylmethacrylate beads activated with NHS, streptavidin-agarose beads, polypropylene, polyethylene, dextran, nylon, amylases, natural and modified celluloses, nitrocellulose, polyacrylamides, gabbros, magnetite, polymers, oligomers, non-repeating moieties, polyethylene glycol (PEG), monomethoxy-PEG, mono-(C₁-C₁₀)alkoxy-PEG, aryloxy-PEG, poly-(N-vinyl pyrrolidone)PEG, tresyl monomethoxy PEG, PEG propionaldehyde, bis-succinimidyl carbonate PEG, polystyrene bead crosslinked with divinylbenzene, propylene glycol homopolymers, a polypropylene oxide/ethylene oxide co-polymer, polyoxyethylated polyols (e.g., glycerol), polyvinyl alcohol, dextran, aminodextran, carbohydrate-based polymers, cross-linked dextran beads, polysaccharide beads, polycarbamate beads, polyvinylcarbamate, divinyl sulfone activated polysaccharide, polystyrene beads that have been functionalized with tosyl-activated esters, magnetic polystyrene beads functionalized with tosyl-activated esters, streptavidin beads, streptavidin-monomer coated beads, streptavidin-tetramer coated beads, Streptavidin Coated Compel Magnetic beads, avidin coated beads, dextramer coated beads, divinyl sulfone-activated dextran, Carboxylate-modified bead, amine-modified beads, antibody coated beads, cellulose beads, grafted co-poly beads, poly-acrylamide beads, dimethylacrylamide beads optionally crosslinked with N—N′-bis-acryloylethylenediamine, hollow fiber membranes, fluorescent beads, collagen-agarose beads, gelatin beads, collagen-gelatin beads, collagen-fibronectin-gelatin beads, collagen beads, chitosan beads, collagen-chitosan beads, protein-based beads, hydrogel beads, hemicellulose, alkyl cellulose, hydroxyalkyl cellulose, carboxymethylcellulose, sulfoethylcellulose, starch, xylan, amylopectine, chondroitin, hyarulonate, heparin, guar, xanthan, mannan, galactomannan, chitin and chitosan.

[0110] In one embodiment the multimerization domain(s) in the present invention is preferable less than 1,000 Da (small molecule scaffold). In another embodiment the multimerization domain(s) is preferable between 1,000 Da and 10,000 Da (small molecule scaffold, small peptides, small polymers). In another embodiment the multimerization domain(s) is between 10,000 Da and 100,000 Da (Small molecule scaffold, polymers e.g. dextran, streptavidin, IgG, pentamer structure). In another embodiment the multimerization domain(s) is preferable between 100,000 Da and 1,000,000 Da (Small molecule scaffold, polymers e.g. dextran, streptavidin, IgG, pentamer structure). In another embodiment the multimerization domain(s) is preferable larger than 1,000,000 Da (Small molecule scaffold, polymers e.g. dextran, streptavidin, IgG, pentamer structure, cells, liposomes, artificial lipid bi layers, polystyrene beads and other beads.

[0111] The present invention relates in one embodiment to a vaccine composition comprising one or more pharmamers, wherein the one or more pharmamers comprises more than 1 multimerization domain such as more than 2, 3, 4, 5, 6, 7, 8, 9, 10, 11, 12, 13, 14, 15, 16, 17, 18, 19, 20, 25, 30, 35, 40, 45, 50, 55, 60, 65, 70, 75, 80, 85, 90, 95, 100, 200, 300, 400, 500, 600, 700, 800, 900, 1,000, 2,000, 3,000, 4,000, 5,000, 6,000, 7,000, 8,000, 9,000, or more than 10,000 multimerization domains.

[0112] The present invention relates in one embodiment to a vaccine composition comprising one or more pharmamers, wherein the one or more pharmamers comprises more than 1 different multimerization domain such as more than 2, 3, 4, 5, 6, 7, 8, 9, 10, 11, 12, 13, 14, 15, 16, 17, 18, 19, 20, 25, 30, 35, 40, 45, 50, 55, 60, 65, 70, 75, 80, 85, 90, 95, 100, 200, 300, 400, 500, 600, 700, 800, 900, 1,000, 2,000, 3,000, 4,000, 5,000, 6,000, 7,000, 8,000, 9,000, or more than 10,000 different multimerization domains.

[0113] The present invention relates in one embodiment to a vaccine composition comprising one or more pharmamers, wherein the one or more pharmamers comprises more than 1 identical multimerization domain such as more than 2, 3, 4, 5, 6, 7, 8, 9, 10, 11, 12, 13, 14, 15, 16, 17, 18, 19, 20, 25, 30, 35, 40, 45, 50, 55, 60, 65, 70, 75, 80, 85, 90, 95, 100, 200, 300, 400, 500, 600, 700, 800, 900, 1,000, 2,000, 3,000, 4,000, 5,000, 6,000, 7,000, 8,000, 9,000, or more than 10,000 identical multimerization domains.

[0114] The present invention relates in one embodiment to a vaccine composition comprising one or more pharmamers, wherein one or more pharmamers comprises less than 10,000 multimerization domains, such as for example less than 9,000, 8,000, 7,000, 6,000, 5,000, 4,000, 3,000, 2,000, 1,000, 900, 800, 700, 600, 500, 400, 300, 200, 100, 95, 90, 85, 80, 75, 70, 65, 60, 55, 50, 45, 40, 35, 30, 25, 20, 15, 10, 9, 8, 7, 6, 5, 4, 3, or less than 2 multimerization domains.

[0115] The present invention relates in one embodiment to a vaccine composition comprising one or more pharmamers, wherein one or more pharmamers comprises less than 10,000 different multimerization domains, such as for example less than 9,000, 8,000, 7,000, 6,000, 5,000, 4,000, 3,000, 2,000, 1,000, 900, 800, 700, 600, 500, 400, 300, 200, 100, 95, 90, 85, 80, 75, 70, 65, 60, 55, 50, 45, 40, 35, 30, 25, 20, 15, 10, 9, 8, 7, 6, 5, 4, 3, or less than 2 different multimerization domains.

[0116] The present invention relates in one embodiment to a vaccine composition comprising one or more pharmamers, wherein one or more pharmamers comprises less than 10,000 identical multimerization domains, such as for example less than 9,000, 8,000, 7,000, 6,000, 5,000, 4,000, 3,000, 2,000, 1,000, 900, 800, 700, 600, 500, 400, 300, 200, 100, 95, 90, 85, 80, 75, 70, 65, 60, 55, 50, 45, 40, 35, 30, 25, 20, 15, 10, 9, 8, 7, 6, 5, 4, 3, or less than 2 identical multimerization domains.

[0117] The present invention relates in one embodiment to a vaccine composition comprising one or more pharmamers, wherein the one or more multimerization domains(s) comprises one or more multimerization domain(s) with a molecular weight in the range 50,000 Da to 5,000,000 Da, such as from 50,000 Da to 100,000 Da, for example from 100,000 Da to 200,000 Da, such as from 200,000 Da to 300,000 Da, for example from 300,000 Da to 400,000 Da, such as from 400,000 Da to 500,000 Da, for example from 500,000 Da to 600,000 Da, such as from 600,000 Da to 700,000 Da, for example from 700,000 Da to 800,000 Da, such as from 800,000 Da to 900,000 Da, for example from 900,000 Da to 1,000,000 Da, such as from 1,000,000 Da to 1,200,000 Da, for example from 1,200,000 Da to 1,400,000 Da, such as from 1,400,000 Da to 1,600,000 Da, for example from 1,600,000 Da to 1,800,000 Da, such as from 1,800,000 Da to 2,000,000 Da, for example from 2,000,000 Da to 2,200,000 Da, such as from 2,200,000 Da to 2,400,000 Da, for example from 2,400,000 Da to 2,600,000 Da, such as from 2,600,000 Da to 2,800,000 Da, for example from 2,800,000 Da to 3,000,000 Da, such as from 3,000,000 Da to 3,200,000 Da, for example from 3,200,000 Da to 3,400,000 Da, such as from 3,400,000 Da to 3,600,000 Da, for example from 3,600,000 Da to 3,800,000 Da, such as from 3,800,000 Da to 4,000,000 Da, for example from 4,000,000 Da to 4,200,000 Da, such as from 4,200,000 Da to 4,400,000 Da, for example from 4,400,000 Da to 4,600,000 Da, such as from 4,600,000 Da to 4,800,000 Da, for example from 4,800,000 Da to 5,000,000 Da.

### Biologically Active Molecules

[0118] Pharmamers consist of one or more biologically active molecules coupled to a multimerization domain, as defined above. The biologically active molecules can be selected among every known biologically active molecule on basis of their function in order to obtain the desired functionality of the pharmamer and the final vaccine. Biologically active molecules are molecules having biological activity. Biologically active molecules in a pharmamer affect the binding characteristics and/or the effects of the pharmamer.

[0119] Biologically active molecules of the present invention can be divided into the following categories:
[0120] Proteins. The proteins may be full length or truncated and may be modified e.g. by introduction of additional amino acids, mutated, chemically modified (e.g. acetylation, methylation, Pegylation, phosphorylation, glycosylation etc.) or carrying other modifications. The proteins may also be stabilized by covalent or non-covalent attachment of protein linkers or other protein molecules. Biologically active protein molecules of the present invention includes but is not limited to:
   [0121] Enzymes
   [0122] Receptor proteins or co-receptor proteins
   [0123] Immunological proteins (se section below for more details)
   [0124] Growth factors (proteins capable of stimulating cellular proliferation and differentiation)
   [0125] Protein hormones
   [0126] Proteins from microorganisms (viral, bacterial, parasitic, fungal etc.)
      [0127] Surface proteins, including full length protein, truncated or otherwise modified proteins. Example surface protein include any protein on the surface of microorganism e.g. the envelope proteins gp41, gp120 or gp140 from HIV or truncated version of these. For vaccine composition purposes surface proteins may be made as recombinant proteins by cloning, expression and purification. Optionally the gene encoding the surface protein or a fragment of the protein may be fused to a gene encoding a protein tag for e.g. enzymatic biotinylation (e.g. comprising a recognition sequence for the BirA enzyme), chemically biotinylation (e.g. comprising an amino acid with a free —SH group), a multimerisation domain, one half of a coiled coil structure or another protein tag or protein fragment. An example of a protein that can be used in vaccine compositions of the present invention is recombinant gp140 may be made by cloning gp140 minus the transmembrane part of the protein leaving just the ecto domain of gp41 and gp120. These two molecules are held together through noncovalently association. An example of an amino acid sequence of such a recombinant gp140 protein is shown in FIG. 8 (SEQ ID NO 9583). Likewise gp120 may be produced recombinantly by cloning and expression.)
      [0128] Intracellular and internal proteins. These are proteins inside cells proteins inside an organism e.g. inside envelop vira. For vaccine composition purposes such proteins may be made as recombinant proteins by cloning, expression and purification. Optionally the gene encoding the intracellular or internal protein or a fragment of the protein may be fused to a gene encoding a protein tag for e.g. enzymatic biotinylation (e.g. comprising a recognition sequence for the BirA enzyme), chemically biotinylation (e.g. comprising an amino acid with a free —SH group), a multimerisation domain, one half of a coiled coil structure or another protein tag or protein fragment Example internal protein includes p27 from HIV that is a protein encoded by the gag gene and is a structural protein of the viral core. An example of the protein sequence of GAG p27 is shown in FIG. 9 (SEQ ID NO 9584).
      [0129] Secreted proteins (e.g. toxins)
         [0130] Unmodified
         [0131] Modified (e.g. toxoid)
         Chemically modified
         Physically modified
[0132] Nucleic acids
   [0133] DNA
      [0134] Encoding protein
      [0135] Structural not encoding protein
   [0136] RNA
      [0137] Ribosome's
      [0138] Antisense
      [0139] Silencing RNA (siRNA)
      [0140] MicroRNA
   [0141] LNA
   [0142] PNA
[0143] Carbohydrates
   [0144] Saccharides and derivatives thereof, e.g. phosphorylated, oxidized, reduced, amino derivatives, acetylated etc. Saccharides may have more than one modification
      [0145] Monosaccharide's
      [0146] Disaccharides
      [0147] Polysaccharides
         [0148] Homopolysaccharides (e.g. glycans, dextran)
         [0149] Polymers of repeating disaccharide units in which one of the sugars are is either N-acetylgalactosamine or N-acetylglucosamine (e.g. Glucosaminoglycans)
         [0150] Polysaccharide-peptide polymer (Peptidoglycan (bacterial cell wall))
      [0151] Proteins carrying covalent attached oligosaccharides or polysaccharides (Glycoprotein's)
      [0152] Lipids carrying covalent attached oligo- or polysaccharides (Glycolipids)
[0153] Lipids
   [0154] Fatty acyls (e.g. prostaglandins, leukotrienes etc.)
   [0155] Glycerolipids (e.g. triglycerides)
   [0156] Glycerophospholipids
   [0157] Sphingolipids
   [0158] Sterol lipids (eg. cholesterol, estrogen etc.)
   [0159] Prenol lipids (eg vitamin E, K)
   [0160] Polyketides (eg. erythromycin)
[0161] Small molecules. Small molecules are medicinal drug compounds having a molecular weights less than 1000 Daltons and include:
   [0162] Natural compounds including but not limited to
      [0163] Hormones
         [0164] Lipid and phospholipid derived hormones
         Steroids
         Eicosanoids
         [0165] Amine-derived hormones (derivatives of amino acids tyrosine and tryptophan (e.g. catecholamine, thyroxine)
      [0166] Salts, e.g. comprising Ca++, Mg++
   [0167] Synthetic chemical compound
      [0168] Benzodiazepines
      [0169] Short peptides
      [0170] Peptidomimetics
      [0171] Other chemical compounds

[0172] In one embodiment the present invention relates to a vaccine composition comprising one or more pharmamers, wherein the one or more pharmamers comprises more than 1 biologically active molecules such as more than 2, 3, 4, 5, 6, 7, 8, 9, 10, 11, 12, 13, 14, 15, 16, 17, 18, 19, 20, 25, 30, 35, 40, 45, 50, 55, 60, 65, 70, 75, 80, 85, 90, 95, 100, 200, 300, 400, 500, 600, 700, 800, 900, 1,000, 2,000, 3,000, 4,000, 5,000, 6,000, 7,000, 8,000, 9,000, or more than 10,000 biological active molecules.

[0173] In another embodiment the present invention relates to a vaccine composition comprising one or more pharmamers, wherein the one or more pharmamers comprises more than 1 different biologically active molecules such as more than 2, 3, 4, 5, 6, 7, 8, 9, 10, 11, 12, 13, 14, 15, 16, 17, 18, 19, 20, 25, 30, 35, 40, 45, 50, 55, 60, 65, 70, 75, 80, 85, 90, 95, 100, 200, 300, 400, 500, 600, 700, 800, 900, 1,000, 2,000, 3,000, 4,000, 5,000, 6,000, 7,000, 8,000, 9,000, or more than 10,000 different biological active molecules.

[0174] In yet another embodiment the present invention relates to a vaccine composition comprising one or more pharmamers, wherein the one or more pharmamers comprises more than 1 identical biologically active molecules such as more than 2, 3, 4, 5, 6, 7, 8, 9, 10, 11, 12, 13, 14, 15, 16, 17, 18, 19, 20, 25, 30, 35, 40, 45, 50, 55, 60, 65, 70, 75, 80, 85, 90, 95, 100, 200, 300, 400, 500, 600, 700, 800, 900, 1,000, 2,000, 3,000, 4,000, 5,000, 6,000, 7,000, 8,000, 9,000, or more than 10,000 identical biological active molecules.

[0175] The present invention further relates to a vaccine composition comprising one or more pharmamers, wherein the one or more pharmamers comprises less than 10,000 biologically active molecules, such as for example less than 9,000, 8,000, 7,000, 6,000, 5,000, 4,000, 3,000, 2,000, 1,000, 900, 800, 700, 600, 500, 400, 300, 200, 100, 95, 90, 85, 80, 75, 70, 65, 60, 55, 50, 45, 40, 35, 30, 25, 20, 15, 10, 9, 8, 7, 6, 5, 4, 3, or less than 2 biologically active molecules.

[0176] The present invention further relates to a vaccine composition comprising one or more pharmamers, wherein the one or more pharmamers comprises less than 10,000 different biologically active molecules, such as for example less than 9,000, 8,000, 7,000, 6,000, 5,000, 4,000, 3,000, 2,000, 1,000, 900, 800, 700, 600, 500, 400, 300, 200, 100, 95, 90, 85, 80, 75, 70, 65, 60, 55, 50, 45, 40, 35, 30, 25, 20, 15, 10, 9, 8, 7, 6, 5, 4, 3 or less than 2 different biologically active molecules.

[0177] The present invention further relates to a vaccine composition comprising one or more pharmamers, wherein the one or more pharmamers comprises less than 10,000 identical biologically active molecules, such as for example less than 9,000, 8,000, 7,000, 6,000, 5,000, 4,000, 3,000, 2,000, 1,000, 900, 800, 700, 600, 500, 400, 300, 200, 100, 95, 90, 85, 80, 75, 70, 65, 60, 55, 50, 45, 40, 35, 30, 25, 20, 15, 10, 9, 8, 7, 6, 5, 4, 3, or less than 2 identical biologically active molecules.

[0178] The present invention further relates to a vaccine composition comprising more than 1 biologically active molecules such as more than 2, 3, 4, 5, 6, 7, 8, 9, 10, 11, 12, 13, 14, 15, 16, 17, 18, 19, 20, 25, 30, 35, 40, 45, 50, 55, 60, 65, 70, 75, 80, 85, 90, 95, 100, 200, 300, 400, 500, 600, 700, 800, 900, 1,000, 2,000, 3,000, 4,000, 5,000, 6,000, 7,000, 8,000, 9,000, or more than 10,000 biological active molecules.

[0179] The present invention further relates to a vaccine composition comprising more than 1 different biologically active molecules such as more than 2, 3, 4, 5, 6, 7, 8, 9, 10, 11, 12, 13, 14, 15, 16, 17, 18, 19, 20, 25, 30, 35, 40, 45, 50, 55, 60, 65, 70, 75, 80, 85, 90, 95, 100, 200, 300, 400, 500, 600, 700, 800, 900, 1,000, 2,000, 3,000, 4,000, 5,000, 6,000, 7,000, 8,000, 9,000, or more than 10,000 different biological active molecules.

[0180] The present invention further relates to a vaccine composition comprising more than 1 identical biologically active molecules such as more than 2, 3, 4, 5, 6, 7, 8, 9, 10, 11, 12, 13, 14, 15, 16, 17, 18, 19, 20, 25, 30, 35, 40, 45, 50, 55, 60, 65, 70, 75, 80, 85, 90, 95, 100, 200, 300, 400, 500, 600, 700, 800, 900, 1,000, 2,000, 3,000, 4,000, 5,000, 6,000, 7,000, 8,000, 9,000, or more than 10,000 identical biological active molecules.

[0181] In one embodiment the present invention relates to a vaccine composition, wherein the composition comprises less than 10,000 biologically active molecules, such as for example less than 9,000, 8,000, 7,000, 6,000, 5,000, 4,000, 3,000, 2,000, 1,000, 900, 800, 700, 600, 500, 400, 300, 200, 100, 95, 90, 85, 80, 75, 70, 65, 60, 55, 50, 45, 40, 35, 30, 25, 20, 15, 10, 9, 8, 7, 6, 5, 4, 3, or less than 2 biologically active molecules.

[0182] In one embodiment the present invention relates to a vaccine composition, wherein the composition comprises less than 10,000 different biologically active molecules, such as for example less than 9,000, 8,000, 7,000, 6,000, 5,000, 4,000, 3,000, 2,000, 1,000, 900, 800, 700, 600, 500, 400, 300, 200, 100, 95, 90, 85, 80, 75, 70, 65, 60, 55, 50, 45, 40, 35, 30, 25, 20, 15, 10, 9, 8, 7, 6, 5, 4, 3 or less than 2 different biologically active molecules.

[0183] In one embodiment the present invention relates to a vaccine composition, wherein the composition comprises less than 10,000 identical biologically active molecules, such as for example less than 9,000, 8,000, 7,000, 6,000, 5,000, 4,000, 3,000, 2,000, 1,000, 900, 800, 700, 600, 500, 400, 300, 200, 100, 95, 90, 85, 80, 75, 70, 65, 60, 55, 50, 45, 40, 35, 30, 25, 20, 15, 10, 9, 8, 7, 6, 5, 4, 3, or less than 2 biologically active molecules.

[0184] In one embodiment the invention relates to a vaccine composition comprising one or more pharmamers and one or more biologically active molecules, wherein the one or more biologically active molecules are not attached to said one or more pharmamers.

[0185] In one embodiment the invention relates to a vaccine composition comprising one or more pharmamers and one or more biologically active molecules, wherein the one or more biologically active molecules are attached to some but not all of the one or more pharmamers.

[0186] In one embodiment the invention relates to a vaccine composition comprising one or more pharmamers and one or more biologically active molecules, wherein the one or more biologically active molecules are attached to one of the one or more pharmamers.

[0187] In one embodiment the invention relates to a vaccine composition comprising one or more pharmamers and one or more biologically active molecules, wherein the one or more biologically active molecules are attached to more than one of the one or more pharmamers such as more to than 2, 3, 4, 5, 6, 7, 8, 9, 10, 11, 12, 13, 14, 15, 16, 17, 18, 19, 20, 25, 30, 35, 40, 45, 50, 55, 60, 65, 70, 75, 80, 85, 90, 95, 100, 200, 300, 400, 500, 600, 700, 800, 900, 1,000, 2,000, 3,000, 4,000, 5,000, 6,000, 7,000, 8,000, 9,000, or to more than 10,000 of the one or more pharmamers.

[0188] In one embodiment the invention relates to a vaccine composition comprising one or more pharmamers and one or more biologically active molecules, wherein the one or more biologically active molecules are attached to less than 10,000 of the one or more pharmamers, such as for example to less than 9,000, 8,000, 7,000, 6,000, 5,000, 4,000, 3,000, 2,000, 1,000, 900, 800, 700, 600, 500, 400, 300, 200, 100, 95, 90, 85, 80, 75, 70, 65, 60, 55, 50, 45, 40, 35, 30, 25, 20, 15, 10, 9, 8, 7, 6, 5, 4, 3 or to less than 2 of the one or more pharmamers.

[0189] In one embodiment the present invention relates to a vaccine composition, wherein the one or more biologically active molecules and the one or more multimerization domain are coupled together either directly or indirectly.

### Immunologically Active Molecules

[0190] In many applications, it will be advantageous that the pharmamer comprises one or more Immunologically active molecules. Immunologically active molecules are compounds that can modulate the immuno-activity of the pharmamer itself or the immune system as such, by affecting binding characteristics or effects of the pharmamer. A pharmamer can comprise several immunologically active molecules which can be the same or different.

[0191] Immunologically active molecules are a subgroup of biologically active molecules for example proteins, co-stimulatory molecules, cell modulating molecules, receptors, accessory molecules, adhesion molecules, natural ligands, and toxic molecules, antibodies, MHC molecules, TCR's and recombinant binding molecules to any of the foregoing, and combinations thereof.

[0192] Immunologically active molecules of special interest for the present invention can be selected from the groups listed below:
[0193] MHC class 1 proteins including HLA-A, HLA-B, HLA-C alleles. Examples of useful MHC 1 alleles are listed in FIG. 1. MHC class proteins useful as immunologically active molecules may be complete trimer molecule complexes or parts of MHC class 1 molecules as follows:
   [0194] Heavy chains
   [0195] Heavy chains combined with beta2 microglobulin
   [0196] Heavy chains combined with beta2 microglobulin and antigenic peptide
   [0197] Heavy chain combined with antigenic peptide
   [0198] Beta2microglobulin
[0199] MHC class 1-like molecules:
   [0200] MICA, MICB
   [0201] CD1d
   [0202] HLA-E, HLA-F, HLA-G, HLA-H
   [0203] ULBP-1, ULBP-2, ULBP-3
[0204] MHC 2 proteins including HLA-DR (HLA-DRA, HLA-DRB1, HLA-DRB3, HLA-DRB4, HLA-DRB5), HLA-DQ (HLA-DQA1, HLADQA2, HLA-DQB1, HLA-DQB2), HLA-DP (HLA-DPA1, HLA-DPB1), HLA-DO (HLA-DOA, HLA-DOB), HLA-DM (HLA-DMA, HLA-DMB). Examples of useful MHC 2 alleles are listed in FIG. 2. MHC class proteins useful as immunologically active molecules may be complete trimer molecule complexes or parts of MHC class 2 molecules as follows:
   [0205] 1 α-heavy chain
   [0206] 1 β-heavy chain
   [0207] 1 α-heavy chain+1 β-heavy chain
   [0208] 1 α-heavy chain+1 β-heavy chain+antigenic peptide
   [0209] Fragments of α-heavy chain or β-heavy chain (MHC II-like peptides). MHC II-like proteins of special interest of the present invention are DRB3*02*03 like peptide: RFLELLKSECHFFNG (SEQ ID NO 9585), DRB4*-like peptide RVWNLIRYIYNQEEY (SEQ ID NO 9586), DRB5*-like peptide FLQQDKYECHFFNG (SEQ ID NO 9587).
[0210] Cytokines including:
   [0211] Interferons such as IFN-alpha, IFN-beta, IFN-gamma
   [0212] Interleukines such as IL-1, IL-2, IL-3, IL-4, IL-6, IL-7, IL-8, IL-10, IL-11, IL-12, IL-15, IL-16, IL-17, IL-18, IL-19, IL-20, IL-21, IL-22, IL-23, IL-24, IL-25, IL-26, IL-27, IL-28, -IL-29, IL-30, IL-31, IL-32, IL-33, IL-34, IL-35
   [0213] Tumor necrosis factors: TNF-alfa, TNF-beta
   [0214] Others: CSFs (colony-stimulating factors), c-Kit, EPO, TGF-β, CD40L, CD27L, CD30L, MIF
[0215] Cytokine receptors like IL-1R, IL-2R, IL-3R, IL-4R, IL-5R, IL-6R, IL-7R, IL-8R, IL-9-R, IL-10R, IL-11R, IL-12R, IL-13R, IL-15R, IL-18R, IL-20R, IL-21R, IL-22R, IL-23R, IL-27R, IL-28R
[0216] Chemokines such as CXCL1, CXCL2, CXCL3, CXCL4, CXCL5, CXCL6, CXCL7, CXCL8, CXCL9, CXCL10, CXCL11, CXCL12, CXCL13, CXCL14, CXCL15, CXCL16, CCL1, CCL2, CCL3, CCL4, CCL5, CCL6, CCL7, CCL8, CCL8, CCL9, CCL10, CCL11, CCL12, CCL13, CCL14, CCL15, CCL16, CCL17, CCL18, CCL19, CCL20, CCL21, CCL22, CCL23, CCL24, CCL25, CCL26, CCL27, CCL28, CXCR4, CCRL2
[0217] Chemokine receptors like CCR1, CCR2, CCR3, CCR4, CCR5, CCR6, CCR7, CCR8, CCR9, CCR10, CCR11, CXCR1, CXCR2, CXCR3, CXCR4, CXCR5, CXCR6, CXCR7, CX3CR1
[0218] Toll-like receptors such as TLR1, TLR2, TLR3, TLR4, TLR5, TLR6, TLR7, TLR8, TLR9, TLR10
[0219] Toll like receptor ligands such as multiple triacyl lipopeptides, multiple diacyl lipopeptides, multiple glycolipids, multiple lipopeptides, multiple lipoproteins, lipoteichoic acid, peptidoglycans, Zymosan, single- and double-stranded RNA, Poly I:C, lipo-polysaccharides, fibrinogen, heparin sulphate fragments, hyaluronic acid fragments, flagellin, imidazoquinoline, loxoribine (guanosine analogue), bropirimine, Imiquimod, unmethylated CpG DNA; Viral entry receptors/molecules such as Ku70, Pvr, Prr1, HVEM, EphrinB2, cellular integrins (in particular alpha2beta1, alpha6beta1 alphaVbeta3), CD81, CD155, SR-B1, claudin-1, xCT, human nectin-2, LIGHT, TLR3, LIR, Heparan sulphate proteoglycans, GPI anchored proteins, hemeagglutinin receptor
[0220] Heat shock proteins such as HSP70, HSP90. The heat shock proteins may be full length, truncated and or modified and may originate from any organism (e.g. bacteria, parasites, humans, animals etc.). An embodiment of special interest of the present invention is the C-terminal part of HSP70 from Mycobacteria tuberculosis, e.g. amino acid 359-609. For vaccine composition purposes the C-terminal part of HSP70 may be mad as a recombinant protein by cloning, expression and purification. Optionally the gene encoding this C-terminal fragment may be fused to a gene encoding a protein tag for e.g. enzymatic biotinylation (e.g. comprising a recognition sequence for the BirA enzyme), chemically biotinylation (e.g. comprising an amino acid with a free —SH group), a multimerisation domain, one half of a coiled coil structure or another protein tag or protein fragment. An example of an amino acid sequence of a recombinant C-terminal fragment of HSP70 from is given below:

(SEQ ID NO 9582)

LLQDFFNGRELNKSINPDEAVAYGAAVQAAILMGDTSGNVQDLLLLDV
APLSLGIETAGGVMTALIKRNTTIPTKQTQTFTTYSDNQPGVLIQVFEGE
RAMTKDNNLLGKFELTGIPPAPRGVPQIEVTFDIDANGILNVSAADKSTG
KQNKITITNDKGRLSKEEIERMVQEADMYKAEDDLQREKISAKNSLESYA
FNMKSSVEDDNLKGKISEEDKKRVIEKCNEAVSWLENNQLADKEEYEHQ
LKELEKVCNPVI

[0221] In another embodiment of the present invention C-terminal fragments of HSP70 from bacteria that are not Mycobacterium Tuberculosis or C-terminal HSP70 fragment's from other organism may be used as biologically active molecule.
[0222] In yet another embodiment
[0223] Bacterial entry receptors/molecules like CD48, CEACAM-1, -2, -3, -4, -5, -6, invasion, internalin (InIA), InIB
[0224] Fc receptors like ε (FcεRI, FcεRII)—γ (FcγRI, FcγRII, FcγRIII)—α/μ (FcαRI, Fcα/μR)—Neonatal FcR
[0225] Lymphocyte homing receptors such as CD44, L-selectin, VLA-4 (CD49a, b, c, d, e, f), LFA-1
[0226] Co-stimulatory molecules such as CD2, CD3, CD4, CD5, CD8, CD9, CD27, CD28, CD30, CD69, CD134 (OX40), CD120, CD137 (4-1BB), CD147, CDw150 (SLAM), CD152 (CTLA-4), CD153 (CD30L), CD40L (CD154), NKG2D, ICOS, PD-1, Fas (CD95), FasL, CD40, CD58, CD70, CD72, B7.1 (CD80), B7.2 (CD86), B7RP-1, B7-H3, PD-L1, PD-L2, CD134L, CD137L, ICOSL
[0227] NK cell receptors/molecules such as CD16, NKp30, NKp44, NKp46, NKp80, 2B4, KIR3DL1, KIR3DL″, KIR3DS1, KIR2DL1, KIRDL2, KIR2DL3, KIR2DL4, KIR2DL5, CD94/NKG2A, CD94/NKG2C, CD94/NKG2E, CD94/NKG2H, NKG2ADNKG2D
[0228] Adhesion molecules such as ICAM-1, ICAM-2, GlyCAM-1, VCAM, CD34
[0229] Anti microbial peptides such Defensins and cathelicidin derived peptide LL-37
[0230] Antibodies (monoclonal, polyclonal, recombinant) directed to a defined antigen e.g. any of the described biologically active molecules, immunologically active molecules, viral antigens, bacterial antigens, parasitic antigens, self-antigens, cancer antigens or any other antigen. Antibodies of the present invention may be full length or derivatives of antibodies including:
   [0231] Full length antibody
   [0232] Fab fragments
   [0233] scFv fragments
   [0234] antibody-like structures e.g. scaffold proteins having the ability to bind antigens
[0235] Toxic molecules selected e.g. toxins, toxids
[0236] Enzymes
[0237] Other molecules such as anti-LFA-1, anti-CD44, anti-beta7, anti-selectin L, anti-selectin E, and anti-selectin P, chemiluminescent substances, bioluminescent substances, polymers, metal particles, and haptens, such as cyclophosphamide, methotrexate, Azathioprine, mizoribine, 15-deoxyspergualin, neomycin, staurosporine, genestein, herbimycin A, Pseudomonas exotoxin A, saporin, Rituxan, Ricin, gemtuzumab ozogamicin, Shiga toxin, vitamin D3, IL-2 toxins, cyclosporin, FK-506, rapamycin, TGF-beta, clotrimazole, nitrendipine, and charybdotoxin, heavy'metals like inorganic and organic mercurials, and FN18-CRM9, radioisotopes such as incorporated isotopes of iodide, cobalt, selenium, tritium, and phosphor, and haptens such as DNP, and digoxiginin
[0238] A pharmamer composition may have one or more than one immunologically active molecule.
[0239] The immunologically active molecule can suitably be attached to the multimerization domain(s) either directly, through one or more linkers or via one or more of the binding entities or one or more multimerization domains as described elsewhere herein. The immunologically active molecules can also be linked to another immunologically active molecule and then attached to one or more multimerization domains.

### MHC Monomer/Multimers and Antigenic Peptides

[0240] The present invention in one aspect refers to a vaccine composition comprising one or more MHC monomer comprising a-b-P, or a MHC multimer comprising (a-b-P)ₙ, wherein n>1,

wherein a and b together form a functional MHC protein capable of binding the antigenic peptide P,
wherein (a-b-P) is the MHC-peptide complex formed when the antigenic peptide P binds to the functional MHC protein, and
wherein each MHC peptide complex of a MHC multimer is associated with one or more multimerization domains.

[0241] In the following the antigenic peptide P is used interchangeably with antigenic peptide.

[0242] Another aspect of the present invention refers to a vaccine composition comprising one or more antigenic peptides not bound to a MHC molecule or an antigenic polypeptide featuring one or more antigenic peptides.

[0243] MHC monomers and MHC multimers comprising one or more MHC peptide complexes of class 1 or class 2 MHC are covered by the present invention. In another embodiment the present invention covers antigenic peptides able to bind MHC class 1 and/or MHC class 2 molecules or antigenic polypeptides featuring such antigenic peptides. Accordingly, the antigenic peptide of the present invention can have a length of e.g. 8, 9, 10, 11, 12, 13, 14, 15, 16, 16-20, or 20-30 amino acid residues.

[0244] There is also provided a MHC multimer comprising 2 or more MHC-peptide complexes and a multimerization domain to which the 2 or more MHC-peptide complexes are associated. The MHC multimer can generally be formed by association of the 2 or more MHC-peptide complexes with the multimerization domain to which the 2 or more MHC-peptide complexes are capable of associating.

[0245] The multimerization domain can be a scaffold associated with one or more MHC-peptide complexes, or a carrier associated with one or more, preferably more than one, MHC-peptide complex(es), or a carrier associated with a plurality of scaffolds each associated with one or more MHC-peptide complexes, such as 2 MHC-peptide complexes, 3 MHC-peptide complexes, 4 MHC-peptide complexes, 5 MHC-peptide complexes or more than 5 MHC-peptide complexes. Accordingly, multimerization domain collectively refers to each and every of the above. It will be clear from the detailed description of the invention provided herein below when the multimerization domain refers to a scaffold or a carrier or a carrier comprising one or more scaffolds.

[0246] Generally, when a multimerization domain comprising a carrier and/or a scaffold is present, the MHC complexes can be associated with this domain either directly or via one or more binding entities. The association can be covalent or non-covalent.

[0247] Accordingly, there is provided in one embodiment a MHC complex comprising one or more entities (a-b-P)ₙ, wherein a and b together form a functional MHC protein capable of binding a antigenic peptide P, and wherein (a-b-P) is the MHC-peptide complex formed when the antigenic peptide P binds to the functional MHC protein, said MHC complex optionally further comprising a multimerization domain comprising a carrier molecule and/or a scaffold. “MHC complex” refers to any MHC complex, including MHC monomers in the form of a single MHC-peptide complex and MHC multimers comprising a multimerization domain to which more than one MHC peptide complex is associated.

[0248] When the invention is directed to a vaccine composition comprising a MHC multimer, i.e. a plurality of MHC peptide complexes of the general composition (a-b-P)ₙ associated with a multimerization domain, n is by definition more than 1, i.e. at least 2 or more. Accordingly, the term “MHC multimer” is used herein specifically to indicate that more than one MHC-peptide complex is associated with a multimerization domain, such as a scaffold or carrier or carrier comprising one or more scaffolds. Accordingly, a single MHC-peptide complex can be associated with a scaffold or a carrier or a carrier comprising a scaffold and a MHC-multimer comprising 2 or more MHC-peptide complexes can be formed by association of the individual MHC-peptide complexes with a scaffold or a carrier or a carrier comprising one or more scaffolds each associated with one or more MHC-peptide complexes.

[0249] When the MHC complex comprises a multimerization domain to which the n MHC-peptide complexes are associated, the association can be a covalent linkage so that each or at least some of the n MHC-peptide complexes is covalently linked to the multimerization domain, or the association can be a non-covalent association so that each or at least some of the n MHC-peptide complexes are non-covalently associated with the multimerization domain.

[0250] The MHC complexes of the invention may be provided in non-soluble or soluble form, depending on the intended application.

[0251] Effective methods to produce a variety of MHC complexes comprising highly polymorphic human HLA encoded proteins makes it possible to perform advanced analyses of complex immune responses, which may comprise a variety of peptide epitope specific T-cell clones.

[0252] One of the benefits of the MHC complexes of the present invention is that the MHC complexes overcome low intrinsic affinities of monomer ligands and counter receptors. The MHC complexes have a large variety of applications that include targeting of high affinity receptors (e.g. hormone peptide receptors for insulin) on target cells. Taken together poly-ligand binding to target cells has numerous practical, clinical and scientifically uses.

[0253] Thus, the present invention provides MHC complexes which present mono-valent or multi-valent binding sites for MHC recognising cells, such as MHC complexes optionally comprising a multimerization domain, such as a scaffold or a carrier molecule, which multimerization domain have attached thereto, directly or indirectly via one or more linkers, covalently or non-covalently, one or more MHC peptide complexes. “One or more” as used herein is intended to include one as well as a plurality, such as at least 2. This applies i.a. to the MHC peptide complexes and to the binding entities of the multimerization domain. The scaffold or carrier molecule may thus have attached thereto a MHC peptide complex or a plurality of such MHC peptide complexes, and/or a linker or a plurality of linkers.

[0254] In one preferred embodiment the present invention relates to pharmamers or a vaccine composition comprising one or more pharmamers, wherein said pharmamers comprise one or more identical or different antigenic peptides, fragments thereof or larger antigenic peptides/proteins comprising one or more of the sequences disclosed in this application.

[0255] An antigenic peptide is any peptide molecule that is bound to or able to bind into the binding groove of either MHC class 1 or MHC class 2.

[0256] The antigenic peptides may be directly attached to a multimerisation domain of a pharmamer using principles as described for other biologically active molecules elsewhere herein, they may be part of a larger protein or they may be bound to the peptide binding groove of MHC molecules and the MHC-peptide complex then attached to the multimerisation domain of the pharmamer.

[0257] The antigenic peptide(s) can e.g. be 8 mers, 9 mers, 10 mers, 11 mers, 12 mers, 13 mers, 14 mers, 15 mers or 16 mers.

[0258] The antigenic peptides can in one embodiment be any antigenic peptide e.g. peptide(s) predicted by the netMHC algorithm (http://www.cbs.dtu.dk/services/NetMHC/).

[0259] In one embodiment the peptide(s) are derived from Lentivirus proteins such as HIV (Human immunodeficiency virus) proteins, like HIV-1 proteins or HIV-2 proteins.

[0260] In another embodiment the peptides are derived from retrovirus proteins such as SIV (Simian immunodeficiency virus) proteins.

[0261] In yet another embodiment the antigenic peptide(s) are derived from a cancer antigen.

[0262] In one embodiment the antigenic peptide(s) are derived from one or more of the HIV-1 proteins NP_{—}057849/Gag-Pol, NP_{—}057850/Pr55(Gag), NP_{—}057851/Vif, NP_{—}057852/Vpr, NP_{—}057853/Tat, NP_{—}057854/Rev, NP_{—}057855/Vpu, NP_{—}057856/Envelope surface glycoprotein gp160 precursor and NP_{—}057857/Nef or any variant or fragment thereof.

[0263] In one embodiment the antigenic peptide(s) include one or more HIV-1 peptides from the table below (SEQ ID NO 1-9568) or any variant or fragment thereof such as antigenic peptides comprising the core sequences listed in the table below or variants thereof.

[0264] HIV-1 peptides derived from the HIV-1 proteins predicted by the netMHC algorithm (http://www.cbs.dtu.dk/services/NetMHC/) are listed in the table herein below.

| Protein | | |
|---|---|---|
| accession no/ | | |
| name | Antigenic peptides | SEQ ID NO |
| NP_57849 | 8-mers: | 1-3715 |
| Gag-Pol | MGARASVL; SVLSGGEL; ELDRWEKI; RWEKIRLR; RLRPGGKK; KLK | |
| | HIVWA; IVWASREL; WASRELER; RELERFAV; FAVNPGLL; SEGCRQ | |
| | IL; QLQPSLQT; LQTGSEEL; QTGSEELR; SLYNTVAT; LYNTVATL; YN | |
| | TVATLY; TVATLYCV; TLYCVHQR; LYCVHQRI; DTKEALDK; KIEEEQ | |
| | NK; DTGHSNQV; QVSQNYPI; NYPIVQNI; YPIVQNIQ; GQMVHQAI; SP | |
| | RTLNAW; RTLNAWVK; TLNAWVKV; WVKVVEEK; KVVEEKAF; EKAF | |
| | SPEV; FSPEVIPM; SPEVIPMF; EVIPMFSA; VIPMFSAL; IPMFSALS; F | |
| | SALSEGA; ALSEGATP; TPQDLNTM; NTVGGHQA; TVGGHQAA; HQA | |
| | AMQML; QAAMQMLK; MQMLKETI; ETINEEAA; EEAAEWDR; EAAEW | |
| | DRV; EWDRVHPV; HPVHAGPI; GPIAPGQM; WMTNNPPI; TNNPPIPV; | |
| | PPIPVGEI; PIPVGEIY; GEIYKRWI; EIYKRWII; IYKRWIIL; KRWIILGL; | |
| | WIILGLNK; IILGLNKI; ILGLNKIV; LGLNKIVR; GLNKIVRM; IVRMYSPT; | |
| | RMYSPTSI; MYSPTSIL; SPTSILDI; RQGPKEPF; DYVDRFYK; YVDRF | |
| | YKT; DRFYKTLR; AEQASQEV; EQASQEVK; ASQEVKNW; EVKNWM | |
| | TE; NWMTETLL; WMTETLLV; ETLLVQNA; NPDCKTIL; ILKALGPA; AL | |
| | GPAATL; TLEEMMTA; EEMMTACQ; MMTACQGV; GVGGPGHK; VLA | |
| | EAMSQ; AEAMSQVT; SQVTNSAT; VTNSATIM; SATIMMQR; IMMQR | |
| | GNF; MMQRGNFR; RGNFRNQR; RNQRKIVK; HTARNCRA; RNCRAP | |
| | RK; NCRAPRKK; APRKKGCW; QMKDCTER; CTERQANF; TERQANF | |
| | L; ERQANFLR; RQANFLRE; FLREDLAF; DLAFLQGK; AFLQGKAR; FL | |
| | QGKARE; LQGKAREF; REFSSEQT; EFSSEQTR; FSSEQTRA; QTRA | |
| | NSPT; RANSPTRR; GADRQGTV; TVSFNFPQ; VSFNFPQV; FNFPQV | |
| | TL; NFPQVTLW; TLWQRPLV; WQRPLVTI; RPLVTIKI; GQLKEALL; TG | |
| | ADDTVL; TVLEEMSL; EEMSLPGR; MSLPGRWK; SLPGRWKP; KPK | |
| | MIGGI; GIGGFIKV; RQYDQILI; EICGHKAI; HKAIGTVL; KAIGTVLV; VL | |
| | VGPTPV; GPTPVNII; TPVNIIGR; NIIGRNLL; NLLTQIGC; LNFPISPI; F | |
| | PISPIET; PISPIETV; SPIETVPV; IETVPVKL; ETVPVKLK; VPVKLKPG; | |
| | KVKQWPLT; KQWPLTEE; WPLTEEKI; TEEKIKAL; EEKIKALV; KIKAL | |
| | VEI; LVEICTEM; EICTEMEK; KIGPENPY; ENPYNTPV; NPYNTPVF; Y | |
| | NTPVFAI; NTPVFAIK; TPVFAIKK; PVFAIKKK; STKWRKLV; KWRKLV | |
| | DF; KLVDFREL; DFRELNKR; RTQDFWEV; QLGIPHPA; GIPHPAGL; I | |
| | PHPAGLK; GLKKKKSV; VLDVGDAY; VGDAYFSV; DAYFSVPL; SVPL | |
| | DEDF; PLDEDFRK; DFRKYTAF; RKYTAFTI; YTAFTIPS; TAFTIPSI; IP | |
| | SINNET; NETPGIRY; ETPGIRYQ; TPGIRYQY; GIRYQYNV; IRYQYNV | |
| | L; YQYNVLPQ; NVLPQGWK; IFQSSMTK; FQSSMTKI; MTKILEPF; TKI | |
| | LEPFR; KILEPFRK; KQNPDIVI; DIVIYQYM; IYQYMDDL; YQYMDDLY; | |
| | QYMDDLYV; YMDDLYVG; DLYVGSDL; YVGSDLEI; DLEIGQHR; EIG | |
| | QHRTK; RTKIEELR; IEELRQHL; EELRQHLL; ELRQHLLR; HLLRWGL | |
| | T; LLRWGLTT; KEPPFLWM; PPFLWMGY; FLWMGYEL; GYELHPDK; | |
| | YELHPDKW; ELHPDKWT; LHPDKWTV; WTVQPIVL; WTVNDIQK; TV | |
| | NDIQKL; IQKLVGKL; KLVGKLNW; KLNWASQI; SQIYPGIK; QIYPGIK | |
| | V; IYPGIKVR; KVRQLCKL; RQLCKLLR; KLLRGTKA; LLRGTKAL; GTK | |
| | ALTEV; ALTEVIPL; EVIPLTEE; PLTEEAEL; TEEAELEL; EEAELELA; E | |
| | LELAENR; ELAENREI; REILKEPV; KEPVHGVY; EPVHGVYY; GVYYD | |
| | PSK; YYDPSKDL; DLIAEIQK; AEIQKQGQ; KQGQGQWT; GQGQWTY | |
| | Q; GQWTYQIY; YQIYQEPF; QIYQEPFK; YQEPFKNL; NLKTGKYA; KT | |
| | GKYARM; TGKYARMR; RMRGAHTN; HTNDVKQL; QLTEAVQK; KITT | |
| | ESIV; TTESIVIW; ESIVIWGK; VIWGKTPK; IWGKTPKF; TPKFKLPI; KF | |
| | KLPIQK; LPIQKETW; IQKETWET; KETWETWW; ETWETWWT; WET | |
| | WWTEY; ETWWTEYW; TEYWQATW; EYWQATWI; WQATWIPE; QAT | |
| | WIPEW; TWIPEWEF; WIPEWEFV; FVNTPPLV; NTPPLVKL; TPPLVKL | |
| | W; PPLVKLWY; PLVKLWYQ; LVKLWYQL; KLWYQLEK; YQLEKEPI; Q | |
| | LEKEPIV; EPIVGAET; IVGAETFY; VGAETFYV; ETFYVDGA; YVDGAA | |
| | NR; GAANRETK; KLGKAGYV; KAGYVTNR; GYVTNRGR; VTNRGRQ | |
| | K; GRQKVVTL; TLTDTTNQ; LTDTTNQK; TTNQKTEL; KTELQAIY; TEL | |
| | QAIYL; ELQAIYLA; LQAIYLAL; LQDSGLEV; SGLEVNIV; NIVTDSQY; I | |
| | VTDSQYA; VTDSQYAL; SQYALGII; YALGIIQA; ALGIIQAQ; SELVNQII; | |
| | NQIIEQLI; QIIEQLIK; IIEQLIKK; QLIKKEKV; LIKKEKVY; KEKVYLAW; | |
| | EKVYLAWV; YLAWVPAH; LAWVPAHK; WVPAHKGI; GIGGNEQV; QV | |
| | DKLVSA; KLVSAGIR; LVSAGIRK; GIRKVLFL; KVLFLDGI; LFLDGIDK; | |
| | FLDGIDKA; KAQDEHEK; EKYHSNWR; YHSNWRAM; AMASDFNL; NL | |
| | PPVVAK; PPVVAKEI; PVVAKEIV; EIVASCDK; CQLKGEAM; GEAMH | |
| | GQV; AMHGQVDC; QVDCSPGI; CSPGIWQL; WQLDCTHL; HLEGKVI | |
| | L; VILVAVHV; ILVAVHVA; AVHVASGY; GYIEAEVI; AEVIPAET; AETG | |
| | QETA; ETGQETAY; GQETAYFL; QETAYFLL; ETAYFLLK; FLLKLAGR; | |
| | KLAGRWPV; LAGRWPVK; GRWPVKTI; WPVKTIHT; HTDNGSNF; NF | |
| | TGATVR; FTGATVRA; TGATVRAA; ATVRAACW; AACWWAGI; WAGI | |
| | KQEF; GIKQEFGI; KQEFGIPY; NPQSQGVV; SQGVVESM; GVVESM | |
| | NK; VESMNKEL; ESMNKELK; SMNKELKK; AEHLKTAV; KTAVQMAV; | |
| | TAVQMAVF; VQMAVFIH; MAVFIHNF; AVFIHNFK; VFIHNFKR; FIHNF | |
| | KRK; YSAGERIV; RIVDIIAT; IATDIQTK; IQTKELQK; LQKQITKI; QITKI | |
| | QNF; ITKIQNFR; TKIQNFRV; KIQNFRVY; IQNFRVYY; QNFRVYYR; R | |
| | VYYRDSR; YRDSRNPL; NPLWKGPA; KGPAKLLW; LLWKGEGA; VIQ | |
| | DNSDI; DIKVVPRR; VVPRRKAK; VPRRKAKI; RRKAKIIR; KIIRDYGK; | |
| | KQMAGDDC; QMAGDDCV | |
| | 9-mers: | |
| | VLSGGELDR; LSGGELDRW; DRWEKIRLR; KIRLRPGGK; RLRPGGK | |
| | KK; GGKKKYKLK; KKYKLKHIV; KYKLKHIVW; KLKHIVWAS; HIVWAS | |
| | REL; WASRELERF; ERFAVNPGL; RFAVNPGLL; AVNPGLLET; GLLE | |
| | TSEGC; ETSEGCRQI; ILGQLQPSL; GQLQPSLQT; SLQTGSEEL; LQT | |
| | GSEELR; GSEELRSLY; ELRSLYNTV; SLYNTVATL; LYNTVATLY; NT | |
| | VATLYCV; ATLYCVHQR; TLYCVHQRI; YCVHQRIEI; CVHQRIEIK; QR | |
| | IEIKDTK; EIKDTKEAL; ALDKIEEEQ; QQAAADTGH; HSNQVSQNY; N | |
| | QVSQNYPI; QVSQNYPIV; QNYPIVQNI; VQNIQGQMV; IQGQMVHQA; | |
| | MVHQAISPR; HQAISPRTL; AISPRTLNA; ISPRTLNAW; SPRTLNAW | |
| | V; RTLNAWVKV; TLNAWVKVV; AWVKVVEEK; EEKAFSPEV; EKAFS | |
| | PEVI; FSPEVIPMF; EVIPMFSAL; IPMFSALSE; ALSEGATPQ; SEGAT | |
| | PQDL; ATPQDLNTM; TPQDLNTML; DLNTMLNTV; NTVGGHQAA; TV | |
| | GGHQAAM; HQAAMQMLK; AMQMLKETI; ETINEEAAE; TINEEAAEW; | |
| | EEAAEWDRV; EAAEWDRVH; AEWDRVHPV; RVHPVHAGP; HPVHA | |
| | GPIA; DIAGTTSTL; TTSTLQEQI; STLQEQIGW; TLQEQIGWM; GWMT | |
| | NNPPI; MTNNPPIPV; NPPIPVGEI; PPIPVGEIY; IPVGEIYKR; GEIYKR | |
| | WII; EIYKRWIIL; YKRWIILGL; RWIILGLNK; WIILGLNKI; IILGLNKIV; GL | |
| | NKIVRMY; KIVRMYSPT; IVRMYSPTS; RMYSPTSIL; SPTSILDIR; SIL | |
| | DIRQGP; ILDIRQGPK; RQGPKEPFR; EPFRDYVDR; PFRDYVDRF; R | |
| | DYVDRFYK; DYVDRFYKT; YVDRFYKTL; VDRFYKTLR; RAEQASQE | |
| | V; QASQEVKNW; EVKNWMTET; NWMTETLLV; WMTETLLVQ; VQNA | |
| | NPDCK; TILKALGPA; ILKALGPAA; KALGPAATL; GPAATLEEM; ATLE | |
| | EMMTA; TLEEMMTAC; EEMMTACQG; EMMTACQGV; GVGGPGHK | |
| | A; GGPGHKARV; GPGHKARVL; KARVLAEAM; VLAEAMSQV; LAEAM | |
| | SQVT; AEAMSQVTN; AMSQVTNSA; SQVTNSATI; QVTNSATIM; VTN | |
| | SATIMM; NSATIMMQR; IMMQRGNFR; MMQRGNFRN; RGNFRNQR | |
| | K; FRNQRKIVK; NQRKIVKCF; IVKCFNCGK; EGHTARNCR; TARNCR | |
| | APR; ARNCRAPRK; RNCRAPRKK; APRKKGCWK; HQMKDCTER; TE | |
| | RQANFLR; NFLREDLAF; FLREDLAFL; LAFLQGKAR; FLQGKAREF; K | |
| | AREFSSEQ; REFSSEQTR; QTRANSPTR; SPTRRELQV; PTRRELQV | |
| | W; RRELQVWGR; ADRQGTVSF; RQGTVSFNF; TVSFNFPQV; FNFP | |
| | QVTLW; FPQVTLWQR; VTLWQRPLV; TLWQRPLVT; LWQRPLVTI; W | |
| | QRPLVTIK; TIKIGGQLK; QLKEALLDT; DTVLEEMSL; EEMSLPGRW; | |
| | EMSLPGRWK; SLPGRWKPK; LPGRWKPKM; KMIGGIGGF; MIGGIG | |
| | GFI; GGIGGFIKV; KVRQYDQIL; RQYDQILIE; QYDQILIEI; ILIEICGHK; | |
| | IEICGHKAI; HKAIGTVLV; TVLVGPTPV; LVGPTPVNI; LLTQIGCTL; TQ | |
| | IGCTLNF; TLNFPISPI; FPISPIETV; SPIETVPVK; VPVKLKPGM; GMD | |
| | GPKVKQ; GPKVKQWPL; KQWPLTEEK; QWPLTEEKI; PLTEEKIKA; L | |
| | TEEKIKAL; ALVEICTEM; CTEMEKEGK; PENPYNTPV; NPYNTPVFA; | |
| | PYNTPVFAI; YNTPVFAIK; NTPVFAIKK; TPVFAIKKK; FAIKKKDST; AI | |
| | KKKDSTK; KWRKLVDFR; KLVDFRELN; LVDFRELNK; ELNKRTQDF; | |
| | KRTQDFWEV; RTQDFWEVQ; TQDFWEVQL; DFWEVQLGI; WEVQL | |
| | GIPH; VQLGIPHPA; LGIPHPAGL; GIPHPAGLK; IPHPAGLKK; TVLDV | |
| | GDAY; VLDVGDAYF; DVGDAYFSV; FSVPLDEDF; SVPLDEDFR; EDF | |
| | RKYTAF; DFRKYTAFT; YTAFTIPSI; FTIPSINNE; TIPSINNET; SINNET | |
| | PGI; ETPGIRYQY; YQYNVLPQG; QYNVLPQGW; VLPQGWKGS; QG | |
| | WKGSPAI; GWKGSPAIF; SPAIFQSSM; AIFQSSMTK; IFQSSMTKI; F | |
| | QSSMTKIL; SMTKILEPF; MTKILEPFR; KQNPDIVIY; NPDIVIYQY; VIY | |
| | QYMDDL; IYQYMDDLY; YQYMDDLYV; YMDDLYVGS; LYVGSDLEI; D | |
| | LEIGQHRT; HRTKIEELR; KIEELRQHL; IEELRQHLL; ELRQHLLRW; R | |
| | QHLLRWGL; HLLRWGLTT; LLRWGLTTP; RWGLTTPDK; TTPDKKH | |
| | QK; EPPFLWMGY; PFLWMGYEL; FLWMGYELH; MGYELHPDK; GYE | |
| | LHPDKW; YELHPDKWT; ELHPDKWTV; KWTVQPIVL; VQPIVLPEK; I | |
| | VLPEKDSW; VLPEKDSWT; LPEKDSWTV; SWTVNDIQK; WTVNDIQ | |
| | KL; TVNDIQKLV; KLVGKLNWA; KLNWASQIY; WASQIYPGI; ASQIYP | |
| | GIK; SQIYPGIKV; QIYPGIKVR; YPGIKVRQL; GIKVRQLCK; LCKLLRG | |
| | TK; KLLRGTKAL; LLRGTKALT; KALTEVIPL; ALTEVIPLT; EVIPLTEEA; | |
| | IPLTEEAEL; EEAELELAE; ELAENREIL; LAENREILK; ILKEPVHGV; K | |
| | EPVHGVYY; HGVYYDPSK; VYYDPSKDL; YYDPSKDLI; IQKQGQGQ | |
| | W; KQGQGQWTY; GQGQWTYQI; TYQIYQEPF; YQIYQEPFK; IYQEP | |
| | FKNL; NLKTGKYAR; KTGKYARMR; KYARMRGAH; YARMRGAHT; D | |
| | VKQLTEAV; KQLTEAVQK; QLTEAVQKI; VQKITTESI; KITTESIVI; ITT | |
| | ESIVIW; ESIVIWGKT; IVIWGKTPK; IWGKTPKFK; KTPKFKLPI; IQKET | |
| | WETW; ETWETWWTE; TWETWWTEY; WETWWTEYW; ETWWTEY | |
| | WQ; WTEYWQATW; TEYWQATWI; WQATWIPEW; ATWIPEWEF; IPE | |
| | WEFVNT; WEFVNTPPL; EFVNTPPLV; FVNTPPLVK; NTPPLVKLW; T | |
| | PPLVKLWY; PLVKLWYQL; WYQLEKEPI; YQLEKEPIV; EPIVGAETF; | |
| | PIVGAETFY; IVGAETFYV; AETFYVDGA; ETFYVDGAA; FYVDGAAN | |
| | R; ANRETKLGK; ETKLGKAGY; KLGKAGYVT; YVTNRGRQK; VTNRG | |
| | RQKV; RGRQKVVTL; TLTDTTNQK; DTTNQKTEL; TTNQKTELQ; NQK | |
| | TELQAI; ELQAIYLAL; LQAIYLALQ; YLALQDSGL; ALQDSGLEV; EVNI | |
| | VTDSQ; IVTDSQYAL; YALGIIQAQ; AQPDQSESE; QPDQSESEL; SES | |
| | ELVNQI; ELVNQIIEQ; LVNQIIEQL; QIIEQLIKK; QLIKKEKVY; LIKKEK | |
| | VYL; KEKVYLAWV; KVYLAWVPA; YLAWVPAHK; KGIGGNEQV; EQV | |
| | DKLVSA; KLVSAGIRK; LVSAGIRKV; VLFLDGIDK; FLDGIDKAQ; KYH | |
| | SNWRAM; NWRAMASDF; RAMASDFNL; ASDFNLPPV; LPPVVAKEI; | |
| | PPVVAKEIV; ASCDKCQLK; GQVDCSPGI; DCSPGIWQL; IWQLDCTH | |
| | L; WQLDCTHLE; THLEGKVIL; HLEGKVILV; EGKVILVAV; KVILVAVH | |
| | V; VILVAVHVA; VAVHVASGY; AVHVASGYI; HVASGYIEA; YIEAEVIP | |
| | A; AEVIPAETG; IPAETGQET; AETGQETAY; ETGQETAYF; GQETAYF | |
| | LL; QETAYFLLK; ETAYFLLKL; YFLLKLAGR; LKLAGRWPV; KLAGRW | |
| | PVK; GRWPVKTIH; WPVKTIHTD; HTDNGSNFT; SNFTGATVR; FTGA | |
| | TVRAA; GATVRAACW; ATVRAACWW; RAACWWAGI; AACWWAGIK; | |
| | WWAGIKQEF; IKQEFGIPY; ESMNKELKK; SMNKELKKI; ELKKIIGQV; | |
| | IIGQVRDQA; HLKTAVQMA; LKTAVQMAV; KTAVQMAVF; TAVQMAV | |
| | FI; AVQMAVFIH; VQMAVFIHN; QMAVFIHNF; MAVFIHNFK; AVFIHNF | |
| | KR; VFIHNFKRK; KRKGGIGGY; IIATDIQTK; ELQKQITKI; KQITKIQNF; | |
| | QITKIQNFR; ITKIQNFRV; KIQNFRVYY; IQNFRVYYR; FRVYYRDSR; | |
| | YYRDSRNPL; PLWKGPAKL; KLLWKGEGA; LLWKGEGAV; VIQDNS | |
| | DIK; IQDNSDIKV; NSDIKVVPR; KVVPRRKAK; VPRRKAKII; KQMAGD | |
| | DCV; QMAGDDCVA | |
| | 10-mers: | |
| | RASVLSGGEL; SVLSGGELDR; VLSGGELDRW; ELDRWEKIRL; KIRL | |
| | RPGGKK; RLRPGGKKKY; RPGGKKKYKL; KKYKLKHIVW; KLKHIVW | |
| | ASR; IVWASRELER; VWASRELERF; LERFAVNPGL; ERFAVNPGLL; | |
| | FAVNPGLLET; ETSEGCRQIL; RQILGQLQPS; QILGQLQPSL; ILGQL | |
| | QPSLQ; SLQTGSEELR; EELRSLYNTV; RSLYNTVATL; SLYNTVATL | |
| | Y; VATLYCVHQR; ATLYCVHQRI; LYCVHQRIEI; IEIKDTKEAL; AADT | |
| | GHSNQV; NQVSQNYPIV; SQNYPIVQNI; PIVQNIQGQM; IVQNIQGQ | |
| | MV; VQNIQGQMVH; NIQGQMVHQA; IQGQMVHQAI; QMVHQAISPR; | |
| | AISPRTLNAW; RTLNAWVKVV; NAWVKVVEEK; WVKVVEEKAF; VEE | |
| | KAFSPEV; EEKAFSPEVI; KAFSPEVIPM; AFSPEVIPMF; PEVIPMFSA | |
| | L; EVIPMFSALS; PMFSALSEGA; ATPQDLNTML; MLNTVGGHQA; NT | |
| | VGGHQAAM; GHQAAMQMLK; AAMQMLKETI; MLKETINEEA; ETINE | |
| | EAAEW; AAEWDRVHPV; RVHPVHAGPI; HPVHAGPIAP; IAPGQMRE | |
| | PR; TSTLQEQIGW; STLQEQIGWM; TLQEQIGWMT; WMTNNPPIPV; | |
| | NPPIPVGEIY; IPVGEIYKRW; GEIYKRWIIL; IYKRWIILGL; KRWIILGL | |
| | NK; RWIILGLNKI; WIILGLNKIV; IILGLNKIVR; ILGLNKIVRM; IVRMYSP | |
| | TSI; MYSPTSILDI; YSPTSILDIR; SILDIRQGPK; DIRQGPKEPF; EPFR | |
| | DYVDRF; DYVDRFYKTL; YVDRFYKTLR; RFYKTLRAEQ; RAEQASQ | |
| | EVK; EVKNWMTETL; WMTETLLVQN; LVQNANPDCK; KTILKALGPA; | |
| | TILKALGPAA; ILKALGPAAT; GPAATLEEMM; ATLEEMMTAC; TLEE | |
| | MMTACQ; EEMMTACQGV; VGGPGHKARV; RVLAEAMSQV; VLAEA | |
| | MSQVT; AEAMSQVTNS; EAMSQVTNSA; AMSQVTNSAT; SQVTNSA | |
| | TIM; QVTNSATIMM; TNSATIMMQR; ATIMMQRGNF; TIMMQRGNFR; | |
| | MMQRGNFRNQ; MQRGNFRNQR; NFRNQRKIVK; KIVKCFNCGK; KE | |
| | GHTARNCR; HTARNCRAPR; TARNCRAPRK; ARNCRAPRKK; RAPR | |
| | KKGCWK; APRKKGCWKC; RKKGCWKCGK; KCGKEGHQMK; QMKD | |
| | CTERQA; CTERQANFLR; RQANFLREDL; NFLREDLAFL; FLREDLAF | |
| | LQ; DLAFLQGKAR; AFLQGKAREF; REFSSEQTRA; EQTRANSPTR; | |
| | QTRANSPTRR; RANSPTRREL; SPTRRELQVW; NSPSEAGADR; EA | |
| | GADRQGTV; GTVSFNFPQV; VSFNFPQVTL; NFPQVTLWQR; QVTL | |
| | WQRPLV; TLWQRPLVTI; WQRPLVTIKI; VTIKIGGQLK; KIGGQLKEA | |
| | L; ALLDTGADDT; LLDTGADDTV; GADDTVLEEM; MSLPGRWKPK; S | |
| | LPGRWKPKM; LPGRWKPKMI; RWKPKMIGGI; KMIGGIGGFI; MIGGI | |
| | GGFIK; FIKVRQYDQI; KVRQYDQILI; RQYDQILIEI; QILIEICGHK; ILIEI | |
| | CGHKA; GTVLVGPTPV; VLVGPTPVNI; LVGPTPVNII; TPVNIIGRNL; II | |
| | GRNLLTQI; NLLTQIGCTL; TQIGCTLNFP; QIGCTLNFPI; CTLNFPISPI; | |
| | FPISPIETVP; PISPIETVPV; ISPIETVPVK; SPIETVPVKL; TVPVKLKP | |
| | GM; KLKPGMDGPK; KQWPLTEEKI; WPLTEEKIKA; PLTEEKIKAL; LT | |
| | EEKIKALV; EEKIKALVEI; KALVEICTEM; LVEICTEMEK; MEKEGKISK | |
| | I; ISKIGPENPY; GPENPYNTPV; PENPYNTPVF; NPYNTPVFAI; PYNT | |
| | PVFAIK; YNTPVFAIKK; NTPVFAIKKK; FAIKKKDSTK; KKKDSTKWRK; | |
| | STKWRKLVDF; KLVDFRELNK; LVDFRELNKR; RELNKRTQDF; RTQ | |
| | DFWEVQL; WEVQLGIPHP; EVQLGIPHPA; QLGIPHPAGL; GIPHPAG | |
| | LKK; IPHPAGLKKK; GLKKKKSVTV; VTVLDVGDAY; TVLDVGDAYF; V | |
| | LDVGDAYFS; YFSVPLDEDF; FSVPLDEDFR; SVPLDEDFRK; VPLDE | |
| | DFRKY; PLDEDFRKYT; DFRKYTAFTI; KYTAFTIPSI; FTIPSINNET; SI | |
| | NNETPGIR; NETPGIRYQY; YQYNVLPQGW; QYNVLPQGWK; LPQG | |
| | WKGSPA; SPAIFQSSMT; PAIFQSSMTK; AIFQSSMTKI; IFQSSMTKIL; | |
| | SSMTKILEPF; SMTKILEPFR; MTKILEPFRK; KQNPDIVIYQ; NPDIVIY | |
| | QYM; IVIYQYMDDL; VIYQYMDDLY; IYQYMDDLYV; YMDDLYVGSD; | |
| | DLYVGSDLEI; LEIGQHRTKI; KIEELRQHLL; EELRQHLLRW; RQHLL | |
| | RWGLT; HLLRWGLTTP; LLRWGLTTPD; LRWGLTTPDK; RWGLTTP | |
| | DKK; LTTPDKKHQK; KHQKEPPFLW; HQKEPPFLWM; KEPPFLWMG | |
| | Y; FLWMGYELHP; MGYELHPDKW; YELHPDKWTV; ELHPDKWTVQ; | |
| | HPDKWTVQPI; TVQPIVLPEK; VLPEKDSWTV; DSWTVNDIQK; SWT | |
| | VNDIQKL; WTVNDIQKLV; KLVGKLNWAS; NWASQIYPGI; WASQIYP | |
| | GIK; QIYPGIKVRQ; IYPGIKVRQL; KVRQLCKLLR; RQLCKLLRGT; QL | |
| | CKLLRGTK; KLLRGTKALT; ALTEVIPLTE; EVIPLTEEAE; VIPLTEEAE | |
| | L; PLTEEAELEL; EAELELAENR; LELAENREIL; ELAENREILK; EILKE | |
| | PVHGV; ILKEPVHGVY; VYYDPSKDLI; DPSKDLIAEI; AEIQKQGQGQ; | |
| | KQGQGQWTYQ; GQGQWTYQIY; WTYQIYQEPF; TYQIYQEPFK; QI | |
| | YQEPFKNL; IYQEPFKNLK; EPFKNLKTGK; PFKNLKTGKY; KNLKTG | |
| | KYAR; NLKTGKYARM; LKTGKYARMR; RMRGAHTNDV; KQLTEAVQ | |
| | KI; AVQKITTESI; VQKITTESIV; KITTESIVIW; TTESIVIWGK; SIVIWGK | |
| | TPK; IVIWGKTPKF; VIWGKTPKFK; IWGKTPKFKL; LPIQKETWET; ET | |
| | WETWWTEY; ETWWTEYWQA; YWQATWIPEW; WQATWIPEWE; Q | |
| | ATWIPEWEF; ATWIPEWEFV; WIPEWEFVNT; WEFVNTPPLV; EFVN | |
| | TPPLVK; FVNTPPLVKL; NTPPLVKLWY; LVKLWYQLEK; QLEKEPIV | |
| | GA; EPIVGAETFY; PIVGAETFYV; AETFYVDGAA; TFYVDGAANR; YV | |
| | DGAANRET; AANRETKLGK; RETKLGKAGY; ETKLGKAGYV; KAGYV | |
| | TNRGR; GYVTNRGRQK; YVTNRGRQKV; VTNRGRQKVV; NRGRQK | |
| | VVTL; VTLTDTTNQK; TLTDTTNQKT; NQKTELQAIY; TELQAIYLAL; E | |
| | LQAIYLALQ; IYLALQDSGL; LALQDSGLEV; LQDSGLEVNI; EVNIVTD | |
| | SQY; NIVTDSQYAL; SQYALGIIQA; AQPDQSESEL; SESELVNQII; EL | |
| | VNQIIEQL; LVNQIIEQLI; NQIIEQLIKK; QLIKKEKVYL; LIKKEKVYLA; E | |
| | KVYLAWVPA; KVYLAWVPAH; VYLAWVPAHK; YLAWVPAHKG; LAW | |
| | VPAHKGI; QVDKLVSAGI; KLVSAGIRKV; VSAGIRKVLF; KVLFLDGID | |
| | K; VLFLDGIDKA; FLDGIDKAQD; DEHEKYHSNW; WRAMASDFNL; M | |
| | ASDFNLPPV; NLPPVVAKEI; LPPVVAKEIV; PPVVAKEIVA; IVASCDK | |
| | CQL; VASCDKCQLK; GIWQLDCTHL; THLEGKVILV; HLEGKVILVA; K | |
| | VILVAVHVA; LVAVHVASGY; VASGYIEAEV; AEVIPAETGQ; IPAETG | |
| | QETA; PAETGQETAY; AETGQETAYF; ETGQETAYFL; GQETAYFLL | |
| | K; QETAYFLLKL; ETAYFLLKLA; AYFLLKLAGR; YFLLKLAGRW; LLKL | |
| | AGRWPV; LKLAGRWPVK; KLAGRWPVKT; TIHTDNGSNF; NGSNFT | |
| | GATV; GSNFTGATVR; TGATVRAACW; GATVRAACWW; ATVRAAC | |
| | WWA; RAACWWAGIK; CWWAGIKQEF; GIKQEFGIPY; IPYNPQSQG | |
| | V; SQGVVESMNK; GVVESMNKEL; VVESMNKELK; SMNKELKKII; EL | |
| | KKIIGQVR; GQVRDQAEHL; QVRDQAEHLK; AEHLKTAVQM; HLKTA | |
| | VQMAV; KTAVQMAVFI; TAVQMAVFIH; VQMAVFIHNF; QMAVFIHNF | |
| | K; MAVFIHNFKR; AVFIHNFKRK; FKRKGGIGGY; RIVDIIATDI; DIIATDI | |
| | QTK; KQITKIQNFR; QITKIQNFRV; ITKIQNFRVY; KIQNFRVYYR; NFR | |
| | VYYRDSR; VYYRDSRNPL; YYRDSRNPLW; RNPLWKGPAK; NPLWK | |
| | GPAKL; PLWKGPAKLL; KLLWKGEGAV; LLWKGEGAVV; VVIQDNSD | |
| | IK; VIQDNSDIKV; IQDNSDIKVV; DNSDIKVVPR; NSDIKVVPRR; RRK | |
| | AKIIRDY; KAKIIRDYGK; KIIRDYGKQM; IIRDYGKQMA; KQMAGDDC | |
| | VA; MAGDDCVASR | |
| | 11-mers: | |
| | VLSGGELDRWE; LSGGELDRWEK; GELDRWEKIRL; ELDRWEKIRL | |
| | R; KIRLRPGGKKK; RLRPGGKKKYK; HIVWASRELER; WASRELERF | |
| | AV; ELERFAVNPGL; LERFAVNPGLL; GLLETSEGCRQ; LLETSEGCR | |
| | QI; LETSEGCRQIL; SEGCRQILGQL; RQILGQLQPSL; ILGQLQPSLQ | |
| | T; QPSLQTGSEEL; LQTGSEELRSL; QTGSEELRSLY; SEELRSLYNT | |
| | V; RSLYNTVATLY; SLYNTVATLYC; LYNTVATLYCV; NTVATLYCVH | |
| | Q; TVATLYCVHQR; TLYCVHQRIEI; LYCVHQRIEIK; EIKDTKEALDK; | |
| | ALDKIEEEQNK; AAADTGHSNQV; HSNQVSQNYPI; YPIVQNIQGQM; | |
| | PIVQNIQGQMV; NIQGQMVHQAI; GQMVHQAISPR; MVHQAISPRTL; | |
| | QAISPRTLNAW; AISPRTLNAWV; ISPRTLNAWVK; SPRTLNAWVKV; | |
| | LNAWVKVVEEK; AWVKVVEEKAF; VVEEKAFSPEV; KAFSPEVIPMF; | |
| | FSPEVIPMFSA; SPEVIPMFSAL; EVIPMFSALSE; IPMFSALSEGA; A | |
| | LSEGATPQDL; EGATPQDLNTM; PQDLNTMLNTV; TMLNTVGGHQA; | |
| | MLNTVGGHQAA; TVGGHQAAMQM; GGHQAAMQMLK; QAAMQML | |
| | KETI; MQMLKETINEE; QMLKETINEEA; MLKETINEEAA; TINEEAAE | |
| | WDR; EAAEWDRVHPV; RVHPVHAGPIA; HPVHAGPIAPG; HAGPIAP | |
| | GQMR; TTSTLQEQIGW; QIGWMTNNPPI; IPVGEIYKRWI; EIYKRWII | |
| | LGL; KRWIILGLNKI; WIILGLNKIVR; IILGLNKIVRM; KIVRMYSPTSI; IV | |
| | RMYSPTSIL; RMYSPTSILDI; MYSPTSILDIR; TSILDIRQGPK; DIRQG | |
| | PKEPFR; RQGPKEPFRDY; QGPKEPFRDYV; EPFRDYVDRFY; PFR | |
| | DYVDRFYK; DYVDRFYKTLR; YVDRFYKTLRA; TLRAEQASQEV; AE | |
| | QASQEVKNW; QEVKNWMTETL; EVKNWMTETLL; WMTETLLVQNA; | |
| | LLVQNANPDCK; NANPDCKTILK; NPDCKTILKAL; KTILKALGPAA; IL | |
| | KALGPAATL; ALGPAATLEEM; EEMMTACQGVG; MTACQGVGGPG; | |
| | ACQGVGGPGHK; GVGGPGHKARV; KARVLAEAMSQ; AEAMSQVT | |
| | NSA; EAMSQVTNSAT; AMSQVTNSATI; MSQVTNSATIM; SQVTNSA | |
| | TIMM; VTNSATIMMQR; ATIMMQRGNFR; MMQRGNFRNQR; MQRG | |
| | NFRNQRK; FRNQRKIVKCF; HTARNCRAPRK; TARNCRAPRKK; EG | |
| | HQMKDCTER; DCTERQANFLR; RQANFLREDLA; QANFLREDLAF; L | |
| | AFLQGKAREF; FLQGKAREFSS; KAREFSSEQTR; EQTRANSPTRR; | |
| | TRANSPTRREL; NSPTRRELQVW; LQVWGRDNNSP; QGTVSFNFP | |
| | QV; TVSFNFPQVTL; VSFNFPQVTLW; FNFPQVTLWQR; FPQVTLW | |
| | QRPL; VTLWQRPLVTI; TLWQRPLVTIK; LWQRPLVTIKI; PLVTIKIGG | |
| | QL; LVTIKIGGQLK; KIGGQLKEALL; QLKEALLDTGA; ALLDTGADDT | |
| | V; LLDTGADDTVL; TGADDTVLEEM; TVLEEMSLPGR; SLPGRWKPK | |
| | MI; GRWKPKMIGGI; KPKMIGGIGGF; KMIGGIGGFIK; MIGGIGGFIKV; | |
| | GFIKVRQYDQI; FIKVRQYDQIL; RQYDQILIEIC; DQILIEICGHK; ILIEI | |
| | CGHKAI; EICGHKAIGTV; TVLVGPTPVNI; VLVGPTPVNII; TPVNIIGR | |
| | NLL; NIIGRNLLTQI; LLTQIGCTLNF; TQIGCTLNFPI; TLNFPISPIET; L | |
| | NFPISPIETV; FPISPIETVPV; ETVPVKLKPGM; KLKPGMDGPKV; GM | |
| | DGPKVKQWP; KVKQWPLTEEK; KQWPLTEEKIK; WPLTEEKIKAL; P | |
| | LTEEKIKALV; ALVEICTEMEK; EICTEMEKEGK; KISKIGPENPY; GPE | |
| | NPYNTPVF; ENPYNTPVFAI; NPYNTPVFAIK; PYNTPVFAIKK; FAIKK | |
| | KDSTKW; AIKKKDSTKWR; KKDSTKWRKLV; STKWRKLVDFR; KLVD | |
| | FRELNKR; TQDFWEVQLGI; WEVQLGIPHPA; VQLGIPHPAGL; QLGI | |
| | PHPAGLK; LGIPHPAGLKK; GIPHPAGLKKK; IPHPAGLKKKK; HPAGL | |
| | KKKKSV; GLKKKKSVTVL; SVTVLDVGDAY; VTVLDVGDAYF; VLDVG | |
| | DAYFSV; DVGDAYFSVPL; AYFSVPLDEDF; YFSVPLDEDFR; FSVPL | |
| | DEDFRK; SVPLDEDFRKY; PLDEDFRKYTA; RKYTAFTIPSI; IPSINNE | |
| | TPGI; SINNETPGIRY; ETPGIRYQYNV; TPGIRYQYNVL; RYQYNVLP | |
| | QGW; YQYNVLPQGWK; VLPQGWKGSPA; LPQGWKGSPAI; KGSPA | |
| | IFQSSM; SPAIFQSSMTK; AIFQSSMTKIL; QSSMTKILEPF; SSMTKIL | |
| | EPFR; SMTKILEPFRK; EPFRKQNPDIV; KQNPDIVIYQY; DIVIYQYMD | |
| | DL; IVIYQYMDDLY; VIYQYMDDLYV; YQYMDDLYVGS; YMDDLYVG | |
| | SDL; DLEIGQHRTKI; GQHRTKIEELR; KIEELRQHLLR; ELRQHLLRW | |
| | GL; RQHLLRWGLTT; LLRWGLTTPDK; LRWGLTTPDKK; KKHQKEPP | |
| | FLW; EPPFLWMGYEL; FLWMGYELHPD; LWMGYELHPDK; ELHPDK | |
| | WTVQP; HPDKWTVQPIV; WTVQPIVLPEK; QPIVLPEKDSW; IVLPEK | |
| | DSWTV; TVNDIQKLVGK; IQKLVGKLNWA; KLVGKLNWASQ; LVGKL | |
| | NWASQI; KLNWASQIYPG; WASQIYPGIKV; ASQIYPGIKVR; QIYPGI | |
| | KVRQL; RQLCKLLRGTK; KLLRGTKALTE; LLRGTKALTEV; GTKALT | |
| | EVIPL; ALTEVIPLTEE; EVIPLTEEAEL; IPLTEEAELEL; PLTEEAELEL | |
| | A; EEAELELAENR; AELELAENREI; ELELAENREIL; AENREILKEPV; | |
| | REILKEPVHGV; EILKEPVHGVY; ILKEPVHGVYY; EPVHGVYYDPS; P | |
| | VHGVYYDPSK; AEIQKQGQGQW; IQKQGQGQWTY; KQGQGQWTY | |
| | QI; QWTYQIYQEPF; WTYQIYQEPFK; YQIYQEPFKNL; QIYQEPFKNL | |
| | K; EPFKNLKTGKY; NLKTGKYARMR; RMRGAHTNDVK; HTNDVKQL | |
| | TEA; DVKQLTEAVQK; QLTEAVQKITT; EAVQKITTESI; AVQKITTESI | |
| | V; ITTESIVIWGK; ESIVIWGKTPK; SIVIWGKTPKF; IVIWGKTPKFK; VI | |
| | WGKTPKFKL; KTPKFKLPIQK; KLPIQKETWET; LPIQKETWETW; IQK | |
| | ETWETWWT; KETWETWWTEY; ETWETWWTEYW; WETWWTEYW | |
| | QA; ETWWTEYWQAT; TWWTEYWQATW; WWTEYWQATWI; EYWQ | |
| | ATWIPEW; WQATWIPEWEF; QATWIPEWEFV; PEWEFVNTPPL; WE | |
| | FVNTPPLVK; EFVNTPPLVKL; FVNTPPLVKLW; KLWYQLEKEPI; YQ | |
| | LEKEPIVGA; EPIVGAETFYV; ETFYVDGAANR; YVDGAANRETK; GA | |
| | ANRETKLGK; RETKLGKAGYV; KLGKAGYVTNR; AGYVTNRGRQK; | |
| | YVTNRGRQKVV; VVTLTDTTNQK; LTDTTNQKTEL; TTNQKTELQAI; | |
| | KTELQAIYLAL; AIYLALQDSGL; YLALQDSGLEV; ALQDSGLEVNI; LQ | |
| | DSGLEVNIV; LEVNIVTDSQY; EVNIVTDSQYA; IVTDSQYALGI; SQYA | |
| | LGIIQAQ; AQPDQSESELV; SELVNQIIEQL; ELVNQIIEQLI; LVNQIIEQ | |
| | LIK; QIIEQLIKKEK; IIEQLIKKEKV; IEQLIKKEKVY; QLIKKEKVYLA; IKK | |
| | EKVYLAWV; KVYLAWVPAHK; YLAWVPAHKGI; GIGGNEQVDKL; EQ | |
| | VDKLVSAGI; QVDKLVSAGIR; KLVSAGIRKVL; LVSAGIRKVLF; GIRK | |
| | VLFLDGI; FLDGIDKAQDE; HSNWRAMASDF; NWRAMASDFNL; AMA | |
| | SDFNLPPV; MASDFNLPPVV; NLPPVVAKEIV; LPPVVAKEIVA; EIVA | |
| | SCDKCQL; IVASCDKCQLK; QLKGEAMHGQV; QVDCSPGIWQL; QL | |
| | DCTHLEGKV; HLEGKVILVAV; ILVAVHVASGY; LVAVHVASGYI; AVH | |
| | VASGYIEA; HVASGYIEAEV; IPAETGQETAY; AETGQETAYFL; ETG | |
| | QETAYFLL; TGQETAYFLLK; GQETAYFLLKL; TAYFLLKLAGR; AYFL | |
| | LKLAGRW; FLLKLAGRWPV; LLKLAGRWPVK; KLAGRWPVKTI; KTIH | |
| | TDNGSNF; HTDNGSNFTGA; NGSNFTGATVR; FTGATVRAACW; TG | |
| | ATVRAACWW; TVRAACWWAGI; ACWWAGIKQEF; WWAGIKQEFGI; | |
| | QEFGIPYNPQS; GIPYNPQSQGV; IPYNPQSQGVV; NPQSQGVVES | |
| | M; QSQGVVESMNK; GVVESMNKELK; VVESMNKELKK; KELKKIIGQ | |
| | VR; GQVRDQAEHLK; AEHLKTAVQMA; HLKTAVQMAVF; AVQMAVFI | |
| | HNF; VQMAVFIHNFK; QMAVFIHNFKR; MAVFIHNFKRK; FIHNFKRK | |
| | GGI; GIGGYSAGERI; GYSAGERIVDI; YSAGERIVDII; IIATDIQTKEL; A | |
| | TDIQTKELQK; QTKELQKQITK; LQKQITKIQNF; KQITKIQNFRV; QITK | |
| | IQNFRVY; ITKIQNFRVYY; TKIQNFRVYYR; QNFRVYYRDSR; RVYY | |
| | RDSRNPL; VYYRDSRNPLW; YYRDSRNPLWK; SRNPLWKGPAK; N | |
| | PLWKGPAKLL; KLLWKGEGAVV; LLWKGEGAVVI; AVVIQDNSDIK; V | |
| | VIQDNSDIKV; VIQDNSDIKVV; DNSDIKVVPRR; DIKVVPRRKAK; VV | |
| | PRRKAKIIR; KQMAGDDCVAS; QMAGDDCVASR | |
| | 15-mer + 9-mer core | |
| | ADDTVLEEMSLPGRW; LEEMSLPGR; AEAMSQVTNSATIMM; AMS | |
| | QVTNSA; AEAMSQVTNSATIMM; MSQVTNSAT; AEAMSQVTNSATI | |
| | MM; QVTNSATIM; AEHLKTAVQMAVFIH; LKTAVQMAV; AENREILKE | |
| | PVHGVY; ILKEPVHGV; AETFYVDGAANRETK; YVDGAANRE; AFLQ | |
| | GKAREFSSEQT; LQGKAREFS; AFSPEVIPMFSALSE; VIPMFSALS; | |
| | AFTIPSINNETPGIR; IPSINNETP; AFTIPSINNETPGIR; PSINNETPG; | |
| | AGERIVDIIATDIQT; IVDIIATDI; AGIKQEFGIPYNPQS; IKQEFGIPY; A | |
| | GLKKKKSVTVLDVG; LKKKKSVTV; AGPIAPGQMREPRGS; IAPGQM | |
| | REP; AGRWPVKTIHTDNGS; VKTIHTDNG; AGYVTNRGRQKVVTL; V | |
| | TNRGRQKV; AGYVTNRGRQKVVTL; YVTNRGRQK; AIFQSSMTKILE | |
| | PFR; FQSSMTKIL; AIGTVLVGPTPVNII; IGTVLVGPT; AIGTVLVGPTP | |
| | VNII; LVGPTPVNI; AIGTVLVGPTPVNII; VLVGPTPVN; AISPRTLNAW | |
| | VKVVE; PRTLNAWVK; AISPRTLNAWVKVVE; TLNAWVKVV; AIYLAL | |
| | QDSGLEVNI; YLALQDSGL; AKLLWKGEGAVVIQD; WKGEGAVVI; AL | |
| | GIIQAQPDQSESE; IIQAQPDQS; ALGIIQAQPDQSESE; IQAQPDQS | |
| | E; AMASDFNLPPVVAKE; DFNLPPVVA; AMASDFNLPPVVAKE; MAS | |
| | DFNLPP; AMSQVTNSATIMMQR; AMSQVTNSA; AMSQVTNSATIMM | |
| | QR; VTNSATIMM; AREFSSEQTRANSPT; FSSEQTRAN; ARMRGAH | |
| | TNDVKQLT; MRGAHTNDV; ARVLAEAMSQVTNSA; LAEAMSQVT; A | |
| | RVLAEAMSQVTNSA; VLAEAMSQV; ASDFNLPPVVAKEIV; DFNLPP | |
| | VVA; ASQEVKNWMTETLLV; VKNWMTETL; ASQIYPGIKVRQLCK; Y | |
| | PGIKVRQL; ASRELERFAVNPGLL; LERFAVNPG; ATDIQTKELQKQI | |
| | TK; IQTKELQKQ; ATIMMQRGNFRNQRK; IMMQRGNFR; ATLEEMMT | |
| | ACQGVGG; LEEMMTACQ; ATPQDLNTMLNTVGG; LNTMLNTVG; AT | |
| | VRAACWWAGIKQE; VRAACWWAG; ATWIPEWEFVNTPPL; ATWIP | |
| | EWEF; ATWIPEWEFVNTPPL; PEWEFVNTP; AVFIHNFKRKGGIGG; | |
| | FIHNFKRKG; AVFIHNFKRKGGIGG; IHNFKRKGG; AVQKITTESIVIW | |
| | GK; VQKITTESI; AVQMAVFIHNFKRKG; VQMAVFIHN; AYFLLKLAGR | |
| | WPVKT; LKLAGRWPV; AYFLLKLAGRWPVKT; LLKLAGRWP; AYFLL | |
| | KLAGRWPVKT; YFLLKLAGR; CDKCQLKGEAMHGQV; LKGEAMHG | |
| | Q; CGHKAIGTVLVGPTP; HKAIGTVLV; CGHKAIGTVLVGPTP; IGTVL | |
| | VGPT; CKLLRGTKALTEVIP; LRGTKALTE; CKTILKALGPAATLE; ILK | |
| | ALGPAA; CKTILKALGPAATLE; LKALGPAAT; CQLKGEAMHGQVDC | |
| | S; LKGEAMHGQ; CRQILGQLQPSLQTG; GQLQPSLQT; CRQILGQLQ | |
| | PSLQTG; LGQLQPSLQ; CTHLEGKVILVAVHV; LEGKVILVA; CTLNFP | |
| | ISPIETVPV; FPISPIETV; DAYFSVPLDEDFRKY; YFSVPLDED; DCKTI | |
| | LKALGPAATL; ILKALGPAA; DCKTILKALGPAATL; LKALGPAAT; DDL | |
| | YVGSDLEIGQHR; YVGSDLEIG; DDTVLEEMSLPGRWK; LEEMSLP | |
| | GR; DEDFRKYTAFTIPSI; FRKYTAFTI; DEDFRKYTAFTIPSI; KYTAFT | |
| | IPS; DEHEKYHSNWRAMAS; EKYHSNWRA; DEHEKYHSNWRAMAS; | |
| | YHSNWRAMA; DFNLPPVVAKEIVAS; DFNLPPVVA; DFRKYTAFTIP | |
| | SINN; FRKYTAFTI; DFRKYTAFTIPSINN; YTAFTIPSI; DFWEVQLGIP | |
| | HPAGL; VQLGIPHPA; DGPKVKQWPLTEEKI; VKQWPLTEE; DIAGTT | |
| | STLQEQIGW; IAGTTSTLQ; DIIATDIQTKELQKQ; ATDIQTKEL; DIKVV | |
| | PRRKAKIIRD; IKVVPRRKA; DIQKLVGKLNWASQI; LVGKLNWAS; DI | |
| | QTKELQKQITKIQ; IQTKELQKQ; DIVIYQYMDDLYVGS; YQYMDDLY | |
| | V; DKCQLKGEAMHGQVD; LKGEAMHGQ; DKLVSAGIRKVLFLD; LVS | |
| | AGIRKV; DKWTVQPIVLPEKDS; WTVQPIVLP; DLAFLQGKAREFSSE; | |
| | FLQGKAREF; DLNTMLNTVGGHQAA; LNTMLNTVG; DLNTMLNTVG | |
| | GHQAA; MLNTVGGHQ; DLYVGSDLEIGQHRT; YVGSDLEIG; DNGS | |
| | NFTGATVRAAC; FTGATVRAA; DNSDIKVVPRRKAKI; IKVVPRRKA; | |
| | DQAEHLKTAVQMAVF; LKTAVQMAV; DQILIEICGHKAIGT; LIEICGH | |
| | KA; DRFYKTLRAEQASQE; DRFYKTLRA; DRFYKTLRAEQASQE; FY | |
| | KTLRAEQ; DRFYKTLRAEQASQE; YKTLRAEQA; DRVHPVHAGPIAP | |
| | GQ; VHAGPIAPG; DSGLEVNIVTDSQYA; LEVNIVTDS; DSQYALGIIQ | |
| | AQPDQ; YALGIIQAQ; DSRNPLWKGPAKLLW; LWKGPAKLL; DTVLE | |
| | EMSLPGRWKP; LEEMSLPGR; DVGDAYFSVPLDEDF; YFSVPLDED; | |
| | DYVDRFYKTLRAEQA; DRFYKTLRA; DYVDRFYKTLRAEQA; FYKTL | |
| | RAEQ; DYVDRFYKTLRAEQA; VDRFYKTLR; DYVDRFYKTLRAEQA; | |
| | YVDRFYKTL; EAMSQVTNSATIMMQ; AMSQVTNSA; EAMSQVTNSA | |
| | TIMMQ; VTNSATIMM; EAVQKITTESIVIWG; VQKITTESI; EDFRKYTA | |
| | FTIPSIN; FRKYTAFTI; EDFRKYTAFTIPSIN; YTAFTIPSI; EDLAFLQG | |
| | KAREFSS; FLQGKAREF; EDLAFLQGKAREFSS; LAFLQGKAR; EEKI | |
| | KALVEICTEME; IKALVEICT; EELRQHLLRWGLTTP; LRQHLLRWG; E | |
| | ELRSLYNTVATLYC; LRSLYNTVA; EELRSLYNTVATLYC; LYNTVAT | |
| | LY; EFGIPYNPQSQGVVE; PYNPQSQGV; EFSSEQTRANSPTRR; FS | |
| | SEQTRAN; EFSSEQTRANSPTRR; QTRANSPTR; EFVNTPPLVKLW | |
| | YQL; FVNTPPLVK; EFVNTPPLVKLWYQL; VNTPPLVKL; EGCRQILG | |
| | QLQPSLQ; CRQILGQLQ; EGCRQILGQLQPSLQ; ILGQLQPSL; EGCR | |
| | QILGQLQPSLQ; RQILGQLQP; EGKISKIGPENPYNT; ISKIGPENP; E | |
| | GKVILVAVHVASGY; LVAVHVASG; EGKVILVAVHVASGY; VILVAVH | |
| | VA; EHEKYHSNWRAMASD; HSNWRAMAS; EHEKYHSNWRAMASD; | |
| | YHSNWRAMA; EHLKTAVQMAVFIHN; LKTAVQMAV; EICGHKAIGT | |
| | VLVGP; HKAIGTVLV; EIYKRWIILGLNKIV; WIILGLNKI; EIYKRWIILGL | |
| | NKIV; YKRWIILGL; EKEPIVGAETFYVDG; IVGAETFYV; EKIKALVEIC | |
| | TEMEK; IKALVEICT; EKVYLAWVPAHKGIG; LAWVPAHKG; EKVYLA | |
| | WVPAHKGIG; VYLAWVPAH; EKVYLAWVPAHKGIG; YLAWVPAHK; | |
| | EKYHSNWRAMASDFN; HSNWRAMAS; EKYHSNWRAMASDFN; YH | |
| | SNWRAMA; ELERFAVNPGLLETS; FAVNPGLLE; ELHPDKWTVQPIV | |
| | LP; DKWTVQPIV; ELHPDKWTVQPIVLP; KWTVQPIVL; ELQAIYLALQ | |
| | DSGLE; LQAIYLALQ; ELQKQITKIQNFRVY; ITKIQNFRV; ELQKQITKI | |
| | QNFRVY; LQKQITKIQ; ELRQHLLRWGLTTPD; LLRWGLTTP; ELRQH | |
| | LLRWGLTTPD; LRQHLLRWG; ELRSLYNTVATLYCV; LYNTVATLY; E | |
| | LRSLYNTVATLYCV; YNTVATLYC; ELVNQIIEQLIKKEK; VNQIIEQLI; | |
| | ENREILKEPVHGVYY; ILKEPVHGV; EPFKNLKTGKYARMR; FKNLKT | |
| | GKY; EPFKNLKTGKYARMR; LKTGKYARM; EPFRKQNPDIVIYQY; F | |
| | RKQNPDIV; EPIVGAETFYVDGAA; IVGAETFYV; EPPFLWMGYELH | |
| | PDK; FLWMGYELH; EPRGSDIAGTTSTLQ; EPRGSDIAG; EPRGSDIA | |
| | GTTSTLQ; GSDIAGTTS; EPRGSDIAGTTSTLQ; RGSDIAGTT; EQAS | |
| | QEVKNWMTETL; EVKNWMTET; EQASQEVKNWMTETL; SQEVKN | |
| | WMT; EQIGWMTNNPPIPVG; IGWMTNNPP; EQIGWMTNNPPIPVG; | |
| | MTNNPPIPV; EQLIKKEKVYLAWVP; IKKEKVYLA; EQVDKLVSAGIR | |
| | KVL; LVSAGIRKV; ERFAVNPGLLETSEG; FAVNPGLLE; ERFAVNPG | |
| | LLETSEG; VNPGLLETS; ERIVDIIATDIQTKE; IVDIIATDI; ESELVNQII | |
| | EQLIKK; LVNQIIEQL; ESIVIWGKTPKFKLP; IVIWGKTPK; ESIVIWGK | |
| | TPKFKLP; IWGKTPKFK; ESIVIWGKTPKFKLP; VIWGKTPKF; ESMNK | |
| | ELKKIIGQVR; MNKELKKII; ETAYFLLKLAGRWPV; AYFLLKLAG; ETA | |
| | YFLLKLAGRWPV; FLLKLAGRW; ETAYFLLKLAGRWPV; YFLLKLAG | |
| | R; ETFYVDGAANRETKL; YVDGAANRE; ETLLVQNANPDCKTI; VQN | |
| | ANPDCK; ETPGIRYQYNVLPQG; IRYQYNVLP; ETVPVKLKPGMDGP | |
| | K; VKLKPGMDG; ETWETWWTEYWQATW; WETWWTEYW; ETWWT | |
| | EYWQATWIPE; EYWQATWIP; ETWWTEYWQATWIPE; WWTEYWQ | |
| | AT; EVIPMFSALSEGATP; IPMFSALSE; EVIPMFSALSEGATP; MFSA | |
| | LSEGA; EVIPMFSALSEGATP; VIPMFSALS; EVKNWMTETLLVQNA; | |
| | NWMTETLLV; EVKNWMTETLLVQNA; WMTETLLVQ; EVQLGIPHPA | |
| | GLKKK; VQLGIPHPA; EWEFVNTPPLVKLWY; FVNTPPLVK; EWEFV | |
| | NTPPLVKLWY; VNTPPLVKL; EWEFVNTPPLVKLWY; WEFVNTPPL; | |
| | EYWQATWIPEWEFVN; WQATWIPEW; FAIKKKDSTKWRKLV; IKKK | |
| | DSTKW; FAVNPGLLETSEGCR; VNPGLLETS; FGIPYNPQSQGVVE | |
| | S; PYNPQSQGV; FIHNFKRKGGIGGYS; FKRKGGIGG; FKNLKTGKY | |
| | ARMRGA; FKNLKTGKY; FKNLKTGKYARMRGA; LKTGKYARM; FKR | |
| | KGGIGGYSAGER; FKRKGGIGG; FLLKLAGRWPVKTIH; KLAGRWP | |
| | VK; FLLKLAGRWPVKTIH; LAGRWPVKT; FLLKLAGRWPVKTIH; LKL | |
| | AGRWPV; FLQGKAREFSSEQTR; FLQGKAREF; FLREDLAFLQGKA | |
| | RE; LAFLQGKAR; FNFPQVTLWQRPLVT; FPQVTLWQR; FNFPQVTL | |
| | WQRPLVT; VTLWQRPLV; FNLPPVVAKEIVASC; VVAKEIVAS; FPISP | |
| | IETVPVKLKP; IETVPVKLK; FPISPIETVPVKLKP; ISPIETVPV; FPQVT | |
| | LWQRPLVTIK; LWQRPLVTI; FPQVTLWQRPLVTIK; TLWQRPLVT; F | |
| | PQVTLWQRPLVTIK; VTLWQRPLV; FQSSMTKILEPFRKQ; FQSSMT | |
| | KIL; FQSSMTKILEPFRKQ; TKILEPFRK; FRKQNPDIVIYQYMD; FRKQ | |
| | NPDIV; FRKYTAFTIPSINNE; FRKYTAFTI; FRKYTAFTIPSINNE; YTA | |
| | FTIPSI; FRNQRKIVKCFNCGK; FRNQRKIVK; FRVYYRDSRNPLWKG; | |
| | FRVYYRDSR; FRVYYRDSRNPLWKG; YRDSRNPLW; FRVYYRDSR | |
| | NPLWKG; YYRDSRNPL; FSPEVIPMFSALSEG; VIPMFSALS; FSSEQ | |
| | TRANSPTRRE; FSSEQTRAN; FSSEQTRANSPTRRE; QTRANSPTR; | |
| | FSSEQTRANSPTRRE; TRANSPTRR; FTGATVRAACWWAGI; FTGA | |
| | TVRAA; FTIPSINNETPGIRY; INNETPGIR; FVNTPPLVKLWYQLE; FV | |
| | NTPPLVK; FVNTPPLVKLWYQLE; VNTPPLVKL; FWEVQLGIPHPAG | |
| | LK; VQLGIPHPA; FYKTLRAEQASQEVK; FYKTLRAEQ; FYKTLRAEQ | |
| | ASQEVK; YKTLRAEQA; FYVDGAANRETKLGK; VDGAANRET; GAD | |
| | DTVLEEMSLPGR; VLEEMSLPG; GAETFYVDGAANRET; YVDGAAN | |
| | RE; GATPQDLNTMLNTVG; DLNTMLNTV; GATPQDLNTMLNTVG; P | |
| | QDLNTMLN; GATVRAACWWAGIKO; VRAACWWAG; GCRQILGQLQ | |
| | PSLQT; LGQLQPSLQ; GCTLNFPISPIETVP; FPISPIETV; GDAYFSVP | |
| | LDEDFRK; YFSVPLDED; GEIYKRWIILGLNKI; IYKRWIILG; GEIYKR | |
| | WIILGLNKI; YKRWIILGL; GERIVDIIATDIQTK; IVDIIATDI; GGHQAAM | |
| | QMLKETIN; AAMQMLKET; GHKAIGTVLVGPTPV; HKAIGTVLV; GHK | |
| | AIGTVLVGPTPV; IGTVLVGPT; GHKARVLAEAMSQVT; VLAEAMSQ | |
| | V; GIIQAQPDQSESELV; IIQAQPDQS; GIIQAQPDQSESELV; IQAQP | |
| | DQSE; GIKVRQLCKLLRGTK; VRQLCKLLR; GIPYNPQSQGVVESM; | |
| | PYNPQSQGV; GIRYQYNVLPQGWKG; IRYQYNVLP; GIRYQYNVLP | |
| | QGWKG; YQYNVLPQG; GKAGYVTNRGRQKVV; VTNRGRQKV; GKA | |
| | GYVTNRGRQKVV; YVTNRGRQK; GKAREFSSEQTRANS; FSSEQT | |
| | RAN; GKISKIGPENPYNTP; IGPENPYNT; GKKKYKLKHIVWASR; YKL | |
| | KHIVWA; GKVILVAVHVASGYI; LVAVHVASG; GKVILVAVHVASGYI; | |
| | VILVAVHVA; GKYARMRGAHTNDVK; MRGAHTNDV; GKYARMRGA | |
| | HTNDVK; YARMRGAHT; GLEVNIVTDSQYALG; VNIVTDSQY; GLKK | |
| | KKSVTVLDVGD; LKKKKSVTV; GLNKIVRMYSPTSIL; IVRMYSPTS; G | |
| | LNKIVRMYSPTSIL; LNKIVRMYS; GLNKIVRMYSPTSIL; VRMYSPTSI; | |
| | GMDGPKVKQWPLTEE; KVKQWPLTE; GNEQVDKLVSAGIRK; VDK | |
| | LVSAGI; GNFRNQRKIVKCFNC; FRNQRKIVK; GPAKLLWKGEGAVVI; | |
| | LWKGEGAVV; GPKVKQWPLTEEKIK; VKQWPLTEE; GPTPVNIIGR | |
| | NLLTQ; VNIIGRNLL; GPAATLEEMMTACQG; LEEMMTACQ; GQETA | |
| | YFLLKLAGRW; YFLLKLAGR; GQLQPSLQTGSEELR; GQLQPSLQT; | |
| | GQMVHQAISPRTLNA; MVHQAISPR; GQMVHQAISPRTLNA; VHQAI | |
| | SPRT; GRNLLTQIGCTLNFP; GRNLLTQIG; GRQKVVTLTDTTNQK; V | |
| | TLTDTTNQ; GRQKVVTLTDTTNQK; VVTLTDTTN; GRWPVKTIHTDN | |
| | GSN; VKTIHTDNG; GSDIAGTTSTLQEQI; IAGTTSTLQ; GSEELRSLY | |
| | NTVATL; LRSLYNTVA; GSNFTGATVRAACWW; FTGATVRAA; GSPA | |
| | IFQSSMTKILE; FQSSMTKIL; GTTSTLQEQIGWMTN; LQEQIGWMT; | |
| | GTVLVGPTPVNIIGR; LVGPTPVNI; GTVSFNFPQVTLWQR; VSFNFP | |
| | QVT; GWKGSPAIFQSSMTK; WKGSPAIFQ; GWMTNNPPIPVGEIY; M | |
| | TNNPPIPV; GYVTNRGRQKVVTLT; VTNRGRQKV; HEKYHSNWRAM | |
| | ASDF; HSNWRAMAS; HEKYHSNWRAMASDF; YHSNWRAMA; HKAI | |
| | GTVLVGPTPVN; HKAIGTVLV; HKAIGTVLVGPTPVN; IGTVLVGPT; H | |
| | KARVLAEAMSQVTN; LAEAMSQVT; HLEGKVILVAVHVAS; VILVAVH | |
| | VA; HLKTAVQMAVFIHNF; LKTAVQMAV; HLLRWGLTTPDKKHQ; LL | |
| | RWGLTTP; HLLRWGLTTPDKKHQ; LRWGLTTPD; HLLRWGLTTPDK | |
| | KHQ; WGLTTPDKK; HNFKRKGGIGGYSAG; FKRKGGIGG; HPAGLK | |
| | KKKSVTVLD; LKKKKSVTV; HPDKWTVQPIVLPEK; WTVQPIVLP; HP | |
| | VHAGPIAPGQMRE; VHAGPIAPG; HQKEPPFLWMGYELH; KEPPFL | |
| | WMG; HQKEPPFLWMGYELH; QKEPPFLWM; HSNWRAMASDFNLP | |
| | P; WRAMASDFN; IAGTTSTLQEQIGWM; IAGTTSTLQ; IATDIQTKELQ | |
| | KQIT; IQTKELQKQ; ICGHKAIGTVLVGPT; HKAIGTVLV; IEAEVIPAET | |
| | GQETA; IPAETGQET; IEELRQHLLRWGLTT; LRQHLLRWG; IEICGH | |
| | KAIGTVLVG; ICGHKAIGT; IEQLIKKEKVYLAWV; IKKEKVYLA; IETVP | |
| | VKLKPGMDGP; VKLKPGMDG; IFQSSMTKILEPFRK; FQSSMTKIL; IF | |
| | QSSMTKILEPFRK; MTKILEPFR; IGCTLNFPISPIETV; NFPISPIET; IG | |
| | PENPYNTPVFAIK; IGPENPYNT; IGRNLLTQIGCTLNF; GRNLLTQIG; | |
| | IGRNLLTQIGCTLNF; IGRNLLTQI; IGTVLVGPTPVNIIG; IGTVLVGPT; | |
| | IGTVLVGPTPVNIIG; LVGPTPVNI; IGTVLVGPTPVNIIG; VLVGPTPV | |
| | N; IGWMTNNPPIPVGEI; IGWMTNNPP; IGWMTNNPPIPVGEI; MTNN | |
| | PPIPV; IGWMTNNPPIPVGEI; WMTNNPPIP; IHNFKRKGGIGGYSA; F | |
| | KRKGGIGG; IIATDIQTKELQKQI; IQTKELQKQ; IIEQLIKKEKVYLAW; I | |
| | KKEKVYLA; IIGRNLLTQIGCTLN; GRNLLTQIG; IIGRNLLTQIGCTLN; I | |
| | GRNLLTQI; IILGLNKIVRMYSPT; ILGLNKIVR; IILGLNKIVRMYSPT; L | |
| | GLNKIVRM; IILGLNKIVRMYSPT; LNKIVRMYS; IIQAQPDQSESELVN; | |
| | IIQAQPDQS; IKKEKVYLAWVPAHK; IKKEKVYLA; IKKEKVYLAWVP | |
| | AHK; VYLAWVPAH; IKVRQLCKLLRGTKA; VRQLCKLLR; IKVVPRRK | |
| | AKIIRDY; IKVVPRRKA; ILEPFRKQNPDIVIY; FRKQNPDIV; ILGLNKIV | |
| | RMYSPTS; ILGLNKIVR; ILGLNKIVRMYSPTS; LGLNKIVRM; ILGLNKI | |
| | VRMYSPTS; LNKIVRMYS; ILGQLQPSLQTGSEE; GQLQPSLQT; ILG | |
| | QLQPSLQTGSEE; LGQLQPSLQ; ILIEICGHKAIGTVL; ICGHKAIGT; IL | |
| | KALGPAATLEEMM; LKALGPAAT; ILVAVHVASGYIEAE; LVAVHVAS | |
| | G; IMMQRGNFRNQRKIV; IMMQRGNFR; INNETPGIRYQYNVL; INNE | |
| | TPGIR; IPEWEFVNTPPLVKL; FVNTPPLVK; IPEWEFVNTPPLVKL; W | |
| | EFVNTPPL; IPHPAGLKKKKSVTV; GLKKKKSVT; IPHPAGLKKKKSV | |
| | TV; PAGLKKKKS; IPMFSALSEGATPQD; MFSALSEGA; IPSINNETPG | |
| | IRYQY; INNETPGIR; IPVGEIYKRWIILGL; IYKRWIILG; IQDNSDIKVV | |
| | PRRKA; IQDNSDIKV; IQGQMVHQAISPRTL; MVHQAISPR; IQGQMV | |
| | HQAISPRTL; VHQAISPRT; IQKETWETWWTEYWQ; WETWWTEYW; | |
| | IQKLVGKLNWASQIY; LVGKLNWAS; IQKLVGKLNWASQIY; VGKLN | |
| | WASQ; IQNFRVYYRDSRNPL; IQNFRVYYR; IQTKELQKQITKIQN; LQ | |
| | KQITKIQ; IRYQYNVLPQGWKGS; IRYQYNVLP; IRYQYNVLPQGWK | |
| | GS; YQYNVLPQG; ISKIGPENPYNTPVF; IGPENPYNT; ISPIETVPVKL | |
| | KPGM; ISPIETVPV; ISPRTLNAWVKVVEE; LNAWVKVVE; ISPRTLNA | |
| | WVKVVEE; TLNAWVKVV; ITKIQNFRVYYRDSR; IQNFRVYYR; ITKIQ | |
| | NFRVYYRDSR; ITKIQNFRV; ITTESIVIWGKTPKF; ITTESIVIW; ITTES | |
| | IVIWGKTPKF; IVIWGKTPK; IVGAETFYVDGAANR; IVGAETFYV; IVI | |
| | WGKTPKFKLPIQ; IVIWGKTPK; IVIWGKTPKFKLPIQ; IWGKTPKFK; I | |
| | VIWGKTPKFKLPIQ; VIWGKTPKF; IVIYQYMDDLYVGSD; YQYMDDL | |
| | YV; IVQNIQGQMVHQAIS; IQGQMVHQA; IVRMYSPTSILDIRQ; IVRM | |
| | YSPTS; IVRMYSPTSILDIRQ; VRMYSPTSI; IVRMYSPTSILDIRQ; YSP | |
| | TSILDI; IVTDSQYALGIIQAQ; QYALGIIQA; IYKRWIILGLNKIVR; WIIL | |
| | GLNKI; IYKRWIILGLNKIVR; YKRWIILGL; IYLALQDSGLEVNIV; LQDS | |
| | GLEVN; IYPGIKVRQLCKLLR; IKVRQLCKL; IYPGIKVRQLCKLLR; YP | |
| | GIKVRQL; IYQEPFKNLKTGKYA; FKNLKTGKY; KAFSPEVIPMFSAL | |
| | S; EVIPMFSAL; KAFSPEVIPMFSALS; FSPEVIPMF; KAFSPEVIPMFS | |
| | ALS; KAFSPEVIP; KAGYVTNRGRQKVVT; VTNRGRQKV; KAGYVTN | |
| | RGRQKVVT; YVTNRGRQK; KAIGTVLVGPTPVNI; IGTVLVGPT; KAIG | |
| | TVLVGPTPVNI; VLVGPTPVN; KALGPAATLEEMMTA; LGPAATLEE; | |
| | KAREFSSEQTRANSP; FSSEQTRAN; KARVLAEAMSQVTNS; LAEA | |
| | MSQVT; KCQLKGEAMHGQVDC; LKGEAMHGQ; KEKVYLAWVPAH | |
| | KGI; LAWVPAHKG; KEKVYLAWVPAHKGI; VYLAWVPAH; KEKVYLA | |
| | WVPAHKGI; YLAWVPAHK; KELKKIIGQVRDQAE; LKKIIGQVR; KELQ | |
| | KQITKIQNFRV; LQKQITKIQ; KEPIVGAETFYVDGA; IVGAETFYV; KE | |
| | PPFLWMGYELHPD; FLWMGYELH; KETWETWWTEYWQAT; WETW | |
| | WTEYW; KGSPAIFQSSMTKIL; IFQSSMTKI; KIEELRQHLLRWGLT; L | |
| | RQHLLRWG; KIGPENPYNTPVFAI; IGPENPYNT; KILEPFRKQNPDIV | |
| | I; FRKQNPDIV; KIQNFRVYYRDSRNP; IQNFRVYYR; KISKIGPENPY | |
| | NTPV; IGPENPYNT; KITTESIVIWGKTPK; ESIVIWGKT; KITTESIVIW | |
| | GKTPK; SIVIWGKTP; KIVRMYSPTSILDIR; IVRMYSPTS; KIVRMYSP | |
| | TSILDIR; VRMYSPTSI; KIVRMYSPTSILDIR; YSPTSILDI; KKEKVYLA | |
| | WVPAHKG; KVYLAWVPA; KKEKVYLAWVPAHKG; VYLAWVPAH; KK | |
| | EKVYLAWVPAHKG; YLAWVPAHK; KKKYKLKHIVWASRE; LKHIVW | |
| | ASR; KKKYKLKHIVWASRE; YKLKHIVWA; KKSVTVLDVGDAYFS; VT | |
| | VLDVGDA; KKYKLKHIVWASREL; LKHIVWASR; KKYKLKHIVWASR | |
| | EL; YKLKHIVWA; KLAGRWPVKTIHTDN; LAGRWPVKT; KLGKAGYV | |
| | TNRGRQK; GYVTNRGRQ; KLGKAGYVTNRGRQK; KAGYVTNRG; K | |
| | LKHIVWASRELERF; LKHIVWASR; KLLRGTKALTEVIPL; LRGTKALT | |
| | E; KLLWKGEGAVVIQDN; WKGEGAVVI; KLVDFRELNKRTQDF; FRE | |
| | LNKRTQ; KLVDFRELNKRTQDF; VDFRELNKR; KLVGKLNWASQIYP | |
| | G; KLNWASQIY; KLVGKLNWASQIYPG; LVGKLNWAS; KLVSAGIRK | |
| | VLFLDG; LVSAGIRKV; KNLKTGKYARMRGAH; LKTGKYARM; KNW | |
| | MTETLLVQNANP; WMTETLLVQ; KQEFGIPYNPQSQGV; FGIPYNP | |
| | QS; KQITKIQNFRVYYRD; IQNFRVYYR; KQITKIQNFRVYYRD; ITKIQ | |
| | NFRV; KQLTEAVQKITTESI; AVQKITTES; KRWIILGLNKIVRMY; ILGL | |
| | NKIVR; KRWIILGLNKIVRMY; LGLNKIVRM; KRWIILGLNKIVRMY; WII | |
| | LGLNKI; KSVTVLDVGDAYFSV; LDVGDAYFS; KTAVQMAVFIHNFKR; | |
| | VQMAVFIHN; KTELQAIYLALQDSG; LQAIYLALQ; KTGKYARMRGA | |
| | HTND; YARMRGAHT; KTILKALGPAATLEE; ILKALGPAA; KTILKALG | |
| | PAATLEE; LKALGPAAT; KVILVAVHVASGYIE; LVAVHVASG; KVILVA | |
| | VHVASGYIE; VILVAVHVA; KVKQWPLTEEKIKAL; VKQWPLTEE; KV | |
| | RQLCKLLRGTKAL; VRQLCKLLR; KVVTLTDTTNQKTEL; VTLTDTTN | |
| | Q; KVYLAWVPAHKGIGG; LAWVPAHKG; KVYLAWVPAHKGIGG; VY | |
| | LAWVPAH; KVYLAWVPAHKGIGG; WVPAHKGIG; KVYLAWVPAHKG | |
| | IGG; YLAWVPAHK; KWRKLVDFRELNKRT; VDFRELNKR; KWTVQPI | |
| | VLPEKDSW; WTVQPIVLP; KYARMRGAHTNDVKQ; MRGAHTNDV; K | |
| | YHSNWRAMASDFNL; WRAMASDFN; KYHSNWRAMASDFNL; YHS | |
| | NWRAMA; KYKLKHIVWASRELE; LKHIVWASR; LAEAMSQVTNSATI | |
| | M; AMSQVTNSA; LAEAMSQVTNSATIM; LAEAMSQVT; LAENREILKE | |
| | PVHGV; EILKEPVHG; LAFLQGKAREFSSEQ; FLQGKAREF; LAGRW | |
| | PVKTIHTDNG; LAGRWPVKT; LAWVPAHKGIGGNEQ; LAWVPAHKG; | |
| | LCKLLRGTKALTEVI; LRGTKALTE; LDEDFRKYTAFTIPS; FRKYTAF | |
| | TI; LDVGDAYFSVPLDED; DAYFSVPLD; LEEMMTACQGVGGPG; MT | |
| | ACQGVGG; LEEMSLPGRWKPKMI; LEEMSLPGR; LEGKVILVAVHV | |
| | ASG; KVILVAVHV; LEGKVILVAVHVASG; VILVAVHVA; LEKEPIVGAE | |
| | TFYVD; IVGAETFYV; LEPFRKQNPDIVIYQ; FRKQNPDIV; LERFAVN | |
| | PGLLETSE; FAVNPGLLE; LERFAVNPGLLETSE; VNPGLLETS; LEV | |
| | NIVTDSQYALGI; VNIVTDSQY; LGIIQAQPDQSESEL; IIQAQPDQS; L | |
| | GIIQAQPDQSESEL; IQAQPDQSE; LGKAGYVTNRGRQKV; YVTNRG | |
| | RQK; LGLNKIVRMYSPTSI; IVRMYSPTS; LGLNKIVRMYSPTSI; LGLN | |
| | KIVRM; LGLNKIVRMYSPTSI; LNKIVRMYS; LGPAATLEEMMTACQ; A | |
| | ATLEEMMT; LGQLQPSLQTGSEEL; LGQLQPSLQ; LHPDKWTVQPIV | |
| | LPE; WTVQPIVLP; LIEICGHKAIGTVLV; ICGHKAIGT; LIKKEKVYLAW | |
| | VPAH; KVYLAWVPA; LKALGPAATLEEMMT; LKALGPAAT; LKHIVWA | |
| | SRELERFA; LKHIVWASR; LKKKKSVTVLDVGDA; LKKKKSVTV; LKL | |
| | AGRWPVKTIHTD; LAGRWPVKT; LKLAGRWPVKTIHTD; LKLAGRW | |
| | PV; LKTAVQMAVFIHNFK; LKTAVQMAV; LKTAVQMAVFIHNFK; VQM | |
| | AVFIHN; LKTGKYARMRGAHTN; YARMRGAHT; LLKLAGRWPVKTIH | |
| | T; LAGRWPVKT; LLKLAGRWPVKTIHT; LKLAGRWPV; LLRWGLTTP | |
| | DKKHQK; LLRWGLTTP; LLRWGLTTPDKKHQK; LRWGLTTPD; LLR | |
| | WGLTTPDKKHQK; WGLTTPDKK; LLVQNANPDCKTILK; VQNANPD | |
| | CK; LLWKGEGAVVIQDNS; WKGEGAVVI; LNFPISPIETVPVKL; ISPIE | |
| | TVPV; LNKIVRMYSPTSILD; IVRMYSPTS; LNKIVRMYSPTSILD; LNKI | |
| | VRMYS; LNKIVRMYSPTSILD; VRMYSPTSI; LNTMLNTVGGHQAAM; | |
| | LNTMLNTVG; LNTMLNTVGGHQAAM; MLNTVGGHQ; LNTVGGHQA | |
| | AMQMLK; VGGHQAAMQ; LPPVVAKEIVASCDK; VVAKEIVAS; LPQG | |
| | WKGSPAIFQSS; WKGSPAIFQ; LQAIYLALQDSGLEV; LQAIYLALQ; L | |
| | QEQIGWMTNNPPIP; IGWMTNNPP; LQKQITKIQNFRVYY; ITKIQNF | |
| | RV; LQKQITKIQNFRVYY; LQKQITKIQ; LREDLAFLQGKAREF; LAFL | |
| | QGKAR; LRQHLLRWGLTTPDK; LLRWGLTTP; LRQHLLRWGLTTPD | |
| | K; LRWGLTTPD; LRSLYNTVATLYCVH; LYNTVATLY; LRSLYNTVAT | |
| | LYCVH; YNTVATLYC; LRWGLTTPDKKHQKE; LRWGLTTPD; LRWGL | |
| | TTPDKKHQKE; WGLTTPDKK; LTEAVQKITTESIVI; VQKITTESI; LTE | |
| | EKIKALVEICTE; IKALVEICT; LVGKLNWASQIYPGI; KLNWASQIY; LV | |
| | GKLNWASQIYPGI; LVGKLNWAS; LVGPTPVNIIGRNLL; GPTPVNIIG; | |
| | LVGPTPVNIIGRNLL; LVGPTPVNI; LVKLWYQLEKEPIVG; VKLWYQ | |
| | LEK; LVSAGIRKVLFLDGI; LVSAGIRKV; LWKGEGAVVIQDNSD; WK | |
| | GEGAVVI; LWKGPAKLLWKGEGA; LWKGPAKLL; LWQRPLVTIKIGG | |
| | QL; LWQRPLVTI; LYNTVATLYCVHQRI; LYNTVATLY; LYNTVATLYC | |
| | VHQRI; YNTVATLYC; MASDFNLPPVVAKEI; DFNLPPVVA; MASDFN | |
| | LPPVVAKEI; MASDFNLPP; MAVFIHNFKRKGGIG; FIHNFKRKG; MA | |
| | VFIHNFKRKGGIG; IHNFKRKGG; MDDLYVGSDLEIGQH; YVGSDLEI | |
| | G; MDGPKVKQWPLTEEK; VKQWPLTEE; MFSALSEGATPQDLN; MF | |
| | SALSEGA; MGARASVLSGGELDR; MGARASVLS; MLNTVGGHQAA | |
| | MQML; MLNTVGGHQ; MLNTVGGHQAAMQML; VGGHQAAMQ; MM | |
| | QRGNFRNQRKIVK; NFRNQRKIV; MMQRGNFRNQRKIVK; QRGNFR | |
| | NQR; MMQRGNFRNQRKIVK; RGNFRNQRK; MNKELKKIIGQVRDQ; | |
| | LKKIIGQVR; MQRGNFRNQRKIVKC; FRNQRKIVK; MRGAHTNDVKQ | |
| | LTEA; MRGAHTNDV; MSQVTNSATIMMQRG; VTNSATIMM; MTETLL | |
| | VQNANPDCK; LLVQNANPD; MTETLLVQNANPDCK; MTETLLVQN; | |
| | MTNNPPIPVGEIYKR; MTNNPPIPV; MVHQAISPRTLNAWV; MVHQAI | |
| | SPR; MVHQAISPRTLNAWV; VHQAISPRT; NDIQKLVGKLNWASQ; L | |
| | VGKLNWAS; NEQVDKLVSAGIRKV; VDKLVSAGI; NETPGIRYQYNV | |
| | LPQ; IRYQYNVLP; NFLREDLAFLQGKAR; FLREDLAFL; NFPISPIETV | |
| | PVKLK; ISPIETVPV; NFPQVTLWQRPLVTI; TLWQRPLVT; NFRNQRK | |
| | IVKCFNCG; FRNQRKIVK; NFRVYYRDSRNPLWK; FRVYYRDSR; NF | |
| | RVYYRDSRNPLWK; YRDSRNPLW; NFRVYYRDSRNPLWK; YYRDS | |
| | RNPL; NFTGATVRAACWWAG; FTGATVRAA; NGSNFTGATVRAAC | |
| | W; FTGATVRAA; NIIGRNLLTQIGCTL; GRNLLTQIG; NIIGRNLLTQIG | |
| | CTL; IGRNLLTQI; NIQGQMVHQAISPRT; IQGQMVHQA; NIQGQMVH | |
| | QAISPRT; MVHQAISPR; NKELKKIIGQVRDQA; LKKIIGQVR; NKIVRM | |
| | YSPTSILDI; IVRMYSPTS; NKIVRMYSPTSILDI; VRMYSPTSI; NLKTG | |
| | KYARMRGAHT; GKYARMRGA; NLKTGKYARMRGAHT; LKTGKYAR | |
| | M; NLKTGKYARMRGAHT; NLKTGKYAR; NLPPVVAKEIVASCD; VVA | |
| | KEIVAS; NNETPGIRYQYNVLP; NNETPGIRY; NPDCKTILKALGPAA; | |
| | CKTILKALG; NPDCKTILKALGPAA; KTILKALGP; NPDIVIYQYMDDLY | |
| | V; IVIYQYMDD; NPLWKGPAKLLWKGE; LWKGPAKLL; NQKTELQAIY | |
| | LALQD; LQAIYLALQ; NREILKEPVHGVYYD; ILKEPVHGV; NRGRQK | |
| | VVTLTDTTN; RQKVVTLTD; NSATIMMQRGNFRNQ; IMMQRGNFR; N | |
| | SDIKVVPRRKAKII; IKVVPRRKA; NTMLNTVGGHQAAMQ; LNTVGG | |
| | HQA; NTMLNTVGGHQAAMQ; MLNTVGGHQ; NTPPLVKLWYQLEKE; | |
| | VKLWYQLEK; NTPVFAIKKKDSTKW; VFAIKKKDS; NTVGGHQAAM | |
| | QMLKE; VGGHQAAMQ; NVLPQGWKGSPAIFQ; GWKGSPAIF; NVLP | |
| | QGWKGSPAIFQ; QGWKGSPAI; NWASQIYPGIKVRQL; SQIYPGIKV; | |
| | NWRAMASDFNLPPVV; MASDFNLPP; NWRAMASDFNLPPVV; WRA | |
| | MASDFN; NYPIVQNIQGQMVHQ; VQNIQGQMV; PAGLKKKKSVTVL | |
| | DV; LKKKKSVTV; PAIFQSSMTKILEPF; FQSSMTKIL; PAKLLWKGEG | |
| | AVVIQ; WKGEGAVVI; PDCKTILKALGPAAT; CKTILKALG; PDCKTILK | |
| | ALGPAAT; ILKALGPAA; PDIVIYQYMDDLYVG; YQYMDDLYV; PDKW | |
| | TVQPIVLPEKD; WTVQPIVLP; PEVIPMFSALSEGAT; VIPMFSALS; P | |
| | EWEFVNTPPLVKLW; FVNTPPLVK; PEWEFVNTPPLVKLW; VNTPP | |
| | LVKL; PEWEFVNTPPLVKLW; WEFVNTPPL; PFKNLKTGKYARMRG; | |
| | FKNLKTGKY; PFKNLKTGKYARMRG; LKTGKYARM; PFRKQNPDIVI | |
| | YQYM; FRKQNPDIV; PGHKARVLAEAMSQV; ARVLAEAMS; PGIKVR | |
| | QLCKLLRGT; VRQLCKLLR; PGIRYQYNVLPQGWK; IRYQYNVLP; P | |
| | GIRYQYNVLPQGWK; YQYNVLPQG; PHPAGLKKKKSVTVL; LKKKK | |
| | SVTV; PIETVPVKLKPGMDG; TVPVKLKPG; PIQKETWETWWTEYW; | |
| | KETWETWWT; PISPIETVPVKLKPG; ISPIETVPV; PIVGAETFYVDGA | |
| | AN; IVGAETFYV; PIVQNIQGQMVHQAI; VQNIQGQMV; PKVKQWPLT | |
| | EEKIKA; VKQWPLTEE; PLDEDFRKYTAFTIP; FRKYTAFTI; PLTEEKI | |
| | KALVEICT; LTEEKIKAL; PLVKLWYQLEKEPIV; VKLWYQLEK; PLWK | |
| | GPAKLLWKGEG; LWKGPAKLL; PMFSALSEGATPQDL; MFSALSEG | |
| | A; PPFLWMGYELHPDKW; FLWMGYELH; PPLVKLWYQLEKEPI; VKL | |
| | WYQLEK; PPVVAKEIVASCDKC; VVAKEIVAS; PQDLNTMLNTVGGH | |
| | Q; DLNTMLNTV; PQDLNTMLNTVGGHQ; LNTMLNTVG; PQGWKGSP | |
| | AIFQSSM; WKGSPAIFQ; PQVTLWQRPLVTIKI; LWQRPLVTI; PQVTL | |
| | WQRPLVTIKI; TLWQRPLVT; PRGSDIAGTTSTLQE; IAGTTSTLQ; PR | |
| | TLNAWVKVVEEKA; LNAWVKVVE; PRTLNAWVKVVEEKA; TLNAWV | |
| | KVV; PSINNETPGIRYQYN; INNETPGIR; PTPVNIIGRNLLTQI; IIGRNL | |
| | LTQ; PTPVNIIGRNLLTQI; VNIIGRNLL; PVFAIKKKDSTKWRK; IKKKD | |
| | STKW; PVGEIYKRWIILGLN; YKRWIILGL; PVHAGPIAPGQMREP; VH | |
| | AGPIAPG; PVKLKPGMDGPKVKQ; VKLKPGMDG; PVNIIGRNLLTQI | |
| | GC; GRNLLTQIG; PVNIIGRNLLTQIGC; VNIIGRNLL; PVVAKEIVASC | |
| | DKCQ; VVAKEIVAS; PAATLEEMMTACQGV; LEEMMTACQ; QAEHLK | |
| | TAVQMAVFI; LKTAVQMAV; QAISPRTLNAWVKVV; ISPRTLNAW; QA | |
| | IYLALQDSGLEVN; YLALQDSGL; QASQEVKNWMTETLL; VKNWMT | |
| | ETL; QATWIPEWEFVNTPP; ATWIPEWEF; QDEHEKYHSNWRAMA; | |
| | KYHSNWRAM; QDFWEVQLGIPHPAG; VQLGIPHPA; QDLNTMLNTV | |
| | GGHQA; LNTMLNTVG; QDLNTMLNTVGGHQA; MLNTVGGHQ; QDN | |
| | SDIKVVPRRKAK; IKVVPRRKA; QDSGLEVNIVTDSQY; LEVNIVTDS; | |
| | QEFGIPYNPQSQGVV; PYNPQSQGV; QEPFKNLKTGKYARM; FKNL | |
| | KTGKY; QEQIGWMTNNPPIPV; IGWMTNNPP; QETAYFLLKLAGRW | |
| | P; FLLKLAGRW; QETAYFLLKLAGRWP; YFLLKLAGR; QEVKNWMTE | |
| | TLLVQN; VKNWMTETL; QGKAREFSSEQTRAN; AREFSSEQT; QGQ | |
| | MVHQAISPRTLN; MVHQAISPR; QGQMVHQAISPRTLN; VHQAISPR | |
| | T; QGTVSFNFPQVTLWQ; VSFNFPQVT; QGWKGSPAIFQSSMT; WK | |
| | GSPAIFQ; QHLLRWGLTTPDKKH; LLRWGLTTP; QHLLRWGLTTPD | |
| | KKH; LRWGLTTPD; QHLLRWGLTTPDKKH; WGLTTPDKK; QIGWMT | |
| | NNPPIPVGE; IGWMTNNPP; QIGWMTNNPPIPVGE; MTNNPPIPV; QI | |
| | GWMTNNPPIPVGE; WMTNNPPIP; QIIEQLIKKEKVYLA; LIKKEKVYL; | |
| | QILGQLQPSLQTGSE; GQLQPSLQT; QILGQLQPSLQTGSE; LGQL | |
| | QPSLQ; QILIEICGHKAIGTV; ICGHKAIGT; QITKIQNFRVYYRDS; IQN | |
| | FRVYYR; QITKIQNFRVYYRDS; ITKIQNFRV; QIYPGIKVRQLCKLL; Y | |
| | PGIKVRQL; QIYQEPFKNLKTGKY; IYQEPFKNL; QIYQEPFKNLKTG | |
| | KY; PFKNLKTGK; QIYQEPFKNLKTGKY; YQEPFKNLK; QKEPPFLW | |
| | MGYELHP; FLWMGYELH; QKETWETWWTEYWQA; WETWWTEYW; | |
| | QKLVGKLNWASQIYP; KLNWASQIY; QKLVGKLNWASQIYP; LVGKL | |
| | NWAS; QKQITKIQNFRVYYR; ITKIQNFRV; QKQITKIQNFRVYYR; TKI | |
| | QNFRVY; QKTELQAIYLALQDS; LQAIYLALQ; QKVVTLTDTTNQKTE; | |
| | LTDTTNQKT; QKVVTLTDTTNQKTE; VTLTDTTNQ; QLCKLLRGTKAL | |
| | TEV; LRGTKALTE; QLEKEPIVGAETFYV; LEKEPIVGA; QLIKKEKVYL | |
| | AWVPA; IKKEKVYLA; QLTEAVQKITTESIV; VQKITTESI; QMAVFIHN | |
| | FKRKGGI; FIHNFKRKG; QMAVFIHNFKRKGGI; VFIHNFKRK; QMVH | |
| | QAISPRTLNAW; MVHQAISPR; QMVHQAISPRTLNAW; VHQAISPRT; | |
| | QNFRVYYRDSRNPLW; FRVYYRDSR; QNFRVYYRDSRNPLW; YY | |
| | RDSRNPL; QNIQGQMVHQAISPR; IQGQMVHQA; QNYPIVQNIQGQ | |
| | MVH; VQNIQGQMV; QRGNFRNQRKIVKCF; FRNQRKIVK; QSESELV | |
| | NQIIEQLI; LVNQIIEQL; QSSMTKILEPFRKQN; TKILEPFRK; QTGSEE | |
| | LRSLYNTVA; SEELRSLYN; QTKELQKQITKIQNF; LQKQITKIQ; QVD | |
| | KLVSAGIRKVLF; LVSAGIRKV; QVTLWQRPLVTIKIG; LWQRPLVTI; Q | |
| | VTLWQRPLVTIKIG; TLWQRPLVT; QVTNSATIMMQRGNF; VTNSATI | |
| | MM; QYALGIIQAQPDQSE; IIQAQPDQS; QYALGIIQAQPDQSE; LGII | |
| | QAQPD; QYMDDLYVGSDLEIG; LYVGSDLEI; RAMASDFNLPPVVAK; | |
| | DFNLPPVVA; RAMASDFNLPPVVAK; MASDFNLPP; RDQAEHLKTA | |
| | VQMAV; HLKTAVQMA; RDSRNPLWKGPAKLL; PLWKGPAKL; RDYV | |
| | DRFYKTLRAEQ; DRFYKTLRA; RDYVDRFYKTLRAEQ; DYVDRFYKT; | |
| | RDYVDRFYKTLRAEQ; VDRFYKTLR; REDLAFLQGKAREFS; FLQG | |
| | KAREF; REDLAFLQGKAREFS; LAFLQGKAR; REFSSEQTRANSPTR; | |
| | FSSEQTRAN; RELERFAVNPGLLET; FAVNPGLLE; RELERFAVNPG | |
| | LLET; LERFAVNPG; RELQVWGRDNNSPSE; WGRDNNSPS; RFAVN | |
| | PGLLETSEGC; FAVNPGLLE; RFAVNPGLLETSEGC; VNPGLLETS; R | |
| | FYKTLRAEQASQEV; FYKTLRAEQ; RFYKTLRAEQASQEV; YKTLRA | |
| | EQA; RGNFRNQRKIVKCFN; FRNQRKIVK; RGRQKVVTLTDTTNQ; K | |
| | VVTLTDTT; RGRQKVVTLTDTTNQ; RQKVVTLTD; RGRQKVVTLTDT | |
| | TNQ; VVTLTDTTN; RGSDIAGTTSTLQEQ; IAGTTSTLQ; RKLVDFREL | |
| | NKRTQD; FRELNKRTQ; RKLVDFRELNKRTQD; VDFRELNKR; RKYT | |
| | AFTIPSINNET; YTAFTIPSI; RMRGAHTNDVKQLTE; MRGAHTNDV; R | |
| | MYSPTSILDIRQGP; YSPTSILDI; RNPLWKGPAKLLWKG; LWKGPAK | |
| | LL; RQGTVSFNFPQVTLW; VSFNFPQVT; RQHLLRWGLTTPDKK; LL | |
| | RWGLTTP; RQHLLRWGLTTPDKK; LRWGLTTPD; RQHLLRWGLTTP | |
| | DKK; RWGLTTPDK; RQILGQLQPSLQTGS; GQLQPSLQT; RQILGQL | |
| | QPSLQTGS; LGQLQPSLQ; RQKVVTLTDTTNQKT; VTLTDTTNQ; RQ | |
| | KVVTLTDTTNQKT; VVTLTDTTN; RQLCKLLRGTKALTE; CKLLRGTK | |
| | A; RRELQVWGRDNNSPS; LQVWGRDNN; RSLYNTVATLYCVHQ; LY | |
| | NTVATLY; RSLYNTVATLYCVHQ; YNTVATLYC; RTKIEELRQHLLRW | |
| | G; ELRQHLLRW; RTKIEELRQHLLRWG; IEELRQHLL; RTLNAWVKV | |
| | VEEKAF; LNAWVKVVE; RTLNAWVKVVEEKAF; TLNAWVKVV; RVHP | |
| | VHAGPIAPGQM; VHAGPIAPG; RVLAEAMSQVTNSAT; AMSQVTNS | |
| | A; RVLAEAMSQVTNSAT; LAEAMSQVT; RVYYRDSRNPLWKGP; YR | |
| | DSRNPLW; RVYYRDSRNPLWKGP; YYRDSRNPL; RWGLTTPDKKH | |
| | QKEP; WGLTTPDKK; RWIILGLNKIVRMYS; ILGLNKIVR; RWIILGLNK | |
| | IVRMYS; LGLNKIVRM; RWIILGLNKIVRMYS; WIILGLNKI; RWPVKTIH | |
| | TDNGSNF; VKTIHTDNG; SAGERIVDIIATDIQ; IVDIIATDI; SATIMMQR | |
| | GNFRNQR; IMMQRGNFR; SCDKCQLKGEAMHGQ; QLKGEAMHG; S | |
| | DFNLPPVVAKEIVA; FNLPPVVAK; SDIAGTTSTLQEQIG; IAGTTSTL | |
| | Q; SDIKVVPRRKAKIIR; IKVVPRRKA; SDIKVVPRRKAKIIR; VVPRRK | |
| | AKI; SEELRSLYNTVATLY; LRSLYNTVA; SELVNQIIEQLIKKE; LVNQII | |
| | EQL; SESELVNQIIEQLIK; LVNQIIEQL; SGLEVNIVTDSQYAL; LEVNI | |
| | VTDS; SINNETPGIRYQYNV; INNETPGIR; SIVIWGKTPKFKLPI; IVIW | |
| | GKTPK; SIVIWGKTPKFKLPI; IWGKTPKFK; SIVIWGKTPKFKLPI; VIW | |
| | GKTPKF; SKIGPENPYNTPVFA; IGPENPYNT; SLYNTVATLYCVHQR; | |
| | LYNTVATLY; SLYNTVATLYCVHQR; YNTVATLYC; SMNKELKKIIGQ | |
| | VRD; LKKIIGQVR; SMTKILEPFRKQNPD; TKILEPFRK; SNFTGATVR | |
| | AACWWA; FTGATVRAA; SNWRAMASDFNLPPV; MASDFNLPP; SN | |
| | WRAMASDFNLPPV; WRAMASDFN; SPAIFQSSMTKILEP; FQSSMT | |
| | KIL; SPEVIPMFSALSEGA; VIPMFSALS; SPRTLNAWVKVVEEK; LNA | |
| | WVKVVE; SPRTLNAWVKVVEEK; TLNAWVKVV; SQEVKNWMTETL | |
| | LVQ; VKNWMTETL; SQIYPGIKVRQLCKL; YPGIKVRQL; SQNYPIVQ | |
| | NIQGQMV; IVQNIQGQM; SQNYPIVQNIQGQMV; SQNYPIVQN; SQV | |
| | TNSATIMMQRGN; VTNSATIMM; SQYALGIIQAQPDQS; LGIIQAQPD; | |
| | SQYALGIIQAQPDQS; YALGIIQAQ; SRELERFAVNPGLLE; LERFAV | |
| | NPG; SRNPLWKGPAKLLWK; LWKGPAKLL; SSEQTRANSPTRREL; | |
| | QTRANSPTR; SSMTKILEPFRKQNP; TKILEPFRK; STLQEQIGWMT | |
| | NNPP; LQEQIGWMT; STLQEQIGWMTNNPP; QIGWMTNNP; SWTVN | |
| | DIQKLVGKLN; VNDIQKLVG; TAVQMAVFIHNFKRK; VQMAVFIHN; T | |
| | AYFLLKLAGRWPVK; FLLKLAGRW; TAYFLLKLAGRWPVK; LKLAGR | |
| | WPV; TAYFLLKLAGRWPVK; YFLLKLAGR; TDIQTKELQKQITKI; IQT | |
| | KELQKQ; TDNGSNFTGATVRAA; NFTGATVRA; TDSQYALGIIQAQP | |
| | D; YALGIIQAQ; TEAVQKITTESIVIW; VQKITTESI; TEEKIKALVEICTE | |
| | M; IKALVEICT; TELQAIYLALQDSGL; LQAIYLALQ; TESIVIWGKTPKF | |
| | KL; IVIWGKTPK; TESIVIWGKTPKFKL; IWGKTPKFK; TESIVIWGKTP | |
| | KFKL; VIWGKTPKF; TETLLVQNANPDCKT; VQNANPDCK; TEYWQA | |
| | TWIPEWEFV; WQATWIPEW; TFYVDGAANRETKLG; YVDGAANRE; | |
| | TGATVRAACWWAGIK; VRAACWWAG; TGKYARMRGAHTNDV; YA | |
| | RMRGAHT; TGQETAYFLLKLAGR; TAYFLLKLA; TGSEELRSLYNTV | |
| | AT; LRSLYNTVA; THLEGKVILVAVHVA; KVILVAVHV; TILKALGPAAT | |
| | LEEM; LKALGPAAT; TIMMQRGNFRNQRKI; IMMQRGNFR; TIPSINN | |
| | ETPGIRYQ; INNETPGIR; TKELQKQITKIQNFR; LQKQITKIQ; TKIEEL | |
| | RQHLLRWGL; LRQHLLRWG; TKILEPFRKQNPDIV; TKILEPFRK; TKI | |
| | QNFRVYYRDSRN; IQNFRVYYR; TKWRKLVDFRELNKR; WRKLVDF | |
| | RE; TLEEMMTACQGVGGP; MTACQGVGG; TLLVQNANPDCKTIL; V | |
| | QNANPDCK; TLNAWVKVVEEKAFS; LNAWVKVVE; TLNFPISPIETV | |
| | PVK; ISPIETVPV; TLQEQIGWMTNNPPI; IGWMTNNPP; TLWQRPLV | |
| | TIKIGGQ; LWQRPLVTI; TMLNTVGGHQAAMQM; MLNTVGGHQ; TML | |
| | NTVGGHQAAMQM; VGGHQAAMQ; TNQKTELQAIYLALQ; KTELQAI | |
| | YL; TNSATIMMQRGNFRN; IMMQRGNFR; TPGIRYQYNVLPQGW; IR | |
| | YQYNVLP; TPGIRYQYNVLPQGW; YQYNVLPQG; TPPLVKLWYQLE | |
| | KEP; VKLWYQLEK; TPQDLNTMLNTVGGH; LNTMLNTVG; TPVFAIK | |
| | KKDSTKWR; IKKKDSTKW; TPVFAIKKKDSTKWR; VFAIKKKDS; TPV | |
| | NIIGRNLLTQIG; IGRNLLTQI; TPVNIIGRNLLTQIG; VNIIGRNLL; TQD | |
| | FWEVQLGIPHPA; EVQLGIPHP; TSTLQEQIGWMTNNP; LQEQIGW | |
| | MT; TTESIVIWGKTPKFK; IVIWGKTPK; TTESIVIWGKTPKFK; VIWGK | |
| | TPKF; TTSTLQEQIGWMTNN; LQEQIGWMT; TVGGHQAAMQMLKET; | |
| | VGGHQAAMQ; TVLDVGDAYFSVPLD; LDVGDAYFS; TVLEEMSLP | |
| | GRWKPK; LEEMSLPGR; TVLVGPTPVNIIGRN; LVGPTPVNI; TVNDI | |
| | QKLVGKLNWA; IQKLVGKLN; TVPVKLKPGMDGPKV; VKLKPGMDG; | |
| | TVRAACWWAGIKQEF; VRAACWWAG; TWETWWTEYWQATWI; W | |
| | ETWWTEYW; TWIPEWEFVNTPPLV; WEFVNTPPL; TWWTEYWQAT | |
| | WIPEW; EYWQATWIP; VDGAANRETKLGKAG; VDGAANRET; VDKL | |
| | VSAGIRKVLFL; LVSAGIRKV; VDRFYKTLRAEQASQ; DRFYKTLRA; V | |
| | DRFYKTLRAEQASQ; FYKTLRAEQ; VDRFYKTLRAEQASQ; YKTLRA | |
| | EQA; VFAIKKKDSTKWRKL; IKKKDSTKW; VFIHNFKRKGGIGGY; FK | |
| | RKGGIGG; VFIHNFKRKGGIGGY; IHNFKRKGG; VGAETFYVDGAAN | |
| | RE; FYVDGAANR; VGDAYFSVPLDEDFR; YFSVPLDED; VGEIYKRW | |
| | IILGLNK; YKRWIILGL; VGGHQAAMQMLKETI; VGGHQAAMQ; VGKL | |
| | NWASQIYPGIK; KLNWASQIY; VGPTPVNIIGRNLLT; VNIIGRNLL; VH | |
| | AGPIAPGQMREPR; VHAGPIAPG; VHPVHAGPIAPGQMR; VHAGPIA | |
| | PG; VHQAISPRTLNAWVK; VHQAISPRT; VILVAVHVASGYIEA; LVAV | |
| | HVASG; VIPMFSALSEGATPQ; MFSALSEGA; VIPMFSALSEGATPQ; | |
| | VIPMFSALS; VIYQYMDDLYVGSDL; YQYMDDLYV; VKLKPGMDGPK | |
| | VKQW; VKLKPGMDG; VKLWYQLEKEPIVGA; VKLWYQLEK; VKNWM | |
| | TETLLVQNAN; NWMTETLLV; VKNWMTETLLVQNAN; WMTETLLVQ; | |
| | VKQWPLTEEKIKALV; VKQWPLTEE; VLAEAMSQVTNSATI; AMSQV | |
| | TNSA; VLAEAMSQVTNSATI; LAEAMSQVT; VLEEMSLPGRWKPKM; | |
| | LEEMSLPGR; VLPQGWKGSPAIFQS; WKGSPAIFQ; VLVGPTPVNII | |
| | GRNL; LVGPTPVNI; VNDIQKLVGKLNWAS; IQKLVGKLN; VNDIQKLV | |
| | GKLNWAS; KLVGKLNWA; VNIIGRNLLTQIGCT; GRNLLTQIG; VNIIG | |
| | RNLLTQIGCT; VNIIGRNLL; VNTPPLVKLWYQLEK; LVKLWYQLE; VN | |
| | TPPLVKLWYQLEK; VNTPPLVKL; VPLDEDFRKYTAFTI; DFRKYTAF | |
| | T; VPVKLKPGMDGPKVK; VKLKPGMDG; VQKITTESIVIWGKT; VQKI | |
| | TTESI; VQLGIPHPAGLKKKK; VQLGIPHPA; VQMAVFIHNFKRKGG; F | |
| | IHNFKRKG; VQMAVFIHNFKRKGG; MAVFIHNFK; VQMAVFIHNFKR | |
| | KGG; VFIHNFKRK; VQNIQGQMVHQAISP; IQGQMVHQA; VRMYSPT | |
| | SILDIRQG; MYSPTSILD; VRMYSPTSILDIRQG; VRMYSPTSI; VRMY | |
| | SPTSILDIRQG; YSPTSILDI; VRQLCKLLRGTKALT; CKLLRGTKA; VR | |
| | QLCKLLRGTKALT; VRQLCKLLR; VRAACWWAGIKQEFG; VRAACW | |
| | WAG; VTDSQYALGIIQAQP; YALGIIQAQ; VTLWQRPLVTIKIGG; LWQ | |
| | RPLVTI; VTNRGRQKVVTLTDT; VTNRGRQKV; VTNSATIMMQRGNF | |
| | R; SATIMMQRG; VTNSATIMMQRGNFR; VTNSATIMM; VTVLDVGDA | |
| | YFSVPL; LDVGDAYFS; VVAKEIVASCDKCQL; VVAKEIVAS; VYLAW | |
| | VPAHKGIGGN; LAWVPAHKG; VYLAWVPAHKGIGGN; WVPAHKGIG; | |
| | VYLAWVPAHKGIGGN; YLAWVPAHK; VYYRDSRNPLWKGPA; YRD | |
| | SRNPLW; WASQIYPGIKVRQLC; YPGIKVRQL; WDRVHPVHAGPIAP | |
| | G; VHPVHAGPI; WEFVNTPPLVKLWYQ; FVNTPPLVK; WEFVNTPPL | |
| | VKLWYQ; VNTPPLVKL; WEFVNTPPLVKLWYQ; WEFVNTPPL; WET | |
| | WWTEYWQATWIP; WETWWTEYW; WETWWTEYWQATWIP; WWT | |
| | EYWQAT; WEVQLGIPHPAGLKK; VQLGIPHPA; WIILGLNKIVRMYSP; | |
| | ILGLNKIVR; WIILGLNKIVRMYSP; LGLNKIVRM; WIILGLNKIVRMYS | |
| | P; LNKIVRMYS; WIILGLNKIVRMYSP; WIILGLNKI; WIPEWEFVNTPP | |
| | LVK; EFVNTPPLV; WIPEWEFVNTPPLVK; WEFVNTPPL; WKGEGAV | |
| | VIQDNSDI; WKGEGAVVI; WKGSPAIFQSSMTKI; WKGSPAIFQ; WMT | |
| | NNPPIPVGEIYK; MTNNPPIPV; WPVKTIHTDNGSNFT; VKTIHTDNG; | |
| | WQATWIPEWEFVNTP; ATWIPEWEF; WRAMASDFNLPPVVA; MAS | |
| | DFNLPP; WRAMASDFNLPPVVA; WRAMASDFN; WRKLVDFRELNK | |
| | RTQ; VDFRELNKR; WTEYWQATWIPEWEF; WQATWIPEW; WTVNDI | |
| | QKLVGKLNW; IQKLVGKLN; WTVQPIVLPEKDSWT; WTVQPIVLP; W | |
| | WTEYWQATWIPEWE; EYWQATWIP; YALGIIQAQPDQSES; IIQAQP | |
| | DQS; YALGIIQAQPDQSES; IQAQPDQSE; YARMRGAHTNDVKQL; M | |
| | RGAHTNDV; YFLLKLAGRWPVKTI; LAGRWPVKT; YFLLKLAGRWPV | |
| | KTI; LKLAGRWPV; YFLLKLAGRWPVKTI; YFLLKLAGR; YHSNWRAM | |
| | ASDFNLP; WRAMASDFN; YIEAEVIPAETGQET; AEVIPAETG; YKLK | |
| | HIVWASRELER; LKHIVWASR; YKRWIILGLNKIVRM; ILGLNKIVR; YK | |
| | RWIILGLNKIVRM; WIILGLNKI; YKTLRAEQASQEVKN; YKTLRAEQA; | |
| | YLALQDSGLEVNIVT; LQDSGLEVN; YLAWVPAHKGIGGNE; LAWVP | |
| | AHKG; YLAWVPAHKGIGGNE; YLAWVPAHK; YMDDLYVGSDLEIGQ; | |
| | YVGSDLEIG; YNTVATLYCVHQRIE; YNTVATLYC; YPGIKVRQLCKL | |
| | LRG; VRQLCKLLR; YPGIKVRQLCKLLRG; YPGIKVRQL; YPIVQNIQG | |
| | QMVHQA; VQNIQGQMV; YQEPFKNLKTGKYAR; FKNLKTGKY; YSA | |
| | GERIVDIIATDI; ERIVDIIAT; YVDGAANRETKLGKA; YVDGAANRE; Y | |
| | VDRFYKTLRAEQAS; DRFYKTLRA; YVDRFYKTLRAEQAS; FYKTLR | |
| | AEQ; YVDRFYKTLRAEQAS; YKTLRAEQA; YWQATWIPEWEFVNT; A | |
| | TWIPEWEF; AATLEEMMTACQGVG; LEEMMTACQ | |
| NP_057850 | 8-mers: | 3716-4962 |
| Pr55(Gag) | MGARASVL; SVLSGGEL; ELDRWEKI; RWEKIRLR; RLRPGGKK; KLK | |
| | HIVWA; IVWASREL; WASRELER; RELERFAV; FAVNPGLL; SEGCRQ | |
| | IL; QLQPSLQT; LQTGSEEL; QTGSEELR; SLYNTVAT; LYNTVATL; YN | |
| | TVATLY; TVATLYCV; TLYCVHQR; LYCVHQRI; DTKEALDK; KIEEEQ | |
| | NK; DTGHSNQV; QVSQNYPI; NYPIVQNI; YPIVQNIQ; GQMVHQAI; SP | |
| | RTLNAW; RTLNAWVK; TLNAWVKV; WVKVVEEK; KVVEEKAF; EKAF | |
| | SPEV; FSPEVIPM; SPEVIPMF; EVIPMFSA; VIPMFSAL; IPMFSALS; F | |
| | SALSEGA; ALSEGATP; TPQDLNTM; NTVGGHQA; TVGGHQAA; HQA | |
| | AMQML; QAAMQMLK; MQMLKETI; ETINEEAA; EEAAEWDR; EAAEW | |
| | DRV; EWDRVHPV; HPVHAGPI; GPIAPGQM; WMTNNPPI; TNNPPIPV; | |
| | PPIPVGEI; PIPVGEIY; GEIYKRWI; EIYKRWII; IYKRWIIL; KRWIILGL; | |
| | WIILGLNK; IILGLNKI; ILGLNKIV; LGLNKIVR; GLNKIVRM; IVRMYSPT; | |
| | RMYSPTSI; MYSPTSIL; SPTSILDI; RQGPKEPF; DYVDRFYK; YVDRF | |
| | YKT; DRFYKTLR; AEQASQEV; EQASQEVK; ASQEVKNW; EVKNWM | |
| | TE; NWMTETLL; WMTETLLV; ETLLVQNA; NPDCKTIL; ILKALGPA; AL | |
| | GPAATL; TLEEMMTA; EEMMTACQ; MMTACQGV; GVGGPGHK; VLA | |
| | EAMSQ; AEAMSQVT; SQVTNSAT; VTNSATIM; SATIMMQR; IMMQR | |
| | GNF; MMQRGNFR; RGNFRNQR; RNQRKIVK; HTARNCRA; RNCRAP | |
| | RK; NCRAPRKK; APRKKGCW; QMKDCTER; CTERQANF; TERQANF | |
| | L; RQANFLGK; FLGKIWPS; KGRPGNFL; TAPPEESF; EESFRSGV; ET | |
| | TTPPQK; QEPIDKEL; EPIDKELY; ELYPLTSL; LYPLTSLR; PLTSLRSL; | |
| | SLFGNDPS | |
| | 9-mers: | |
| | VLSGGELDR; LSGGELDRW; DRWEKIRLR; KIRLRPGGK; RLRPGGK | |
| | KK; GGKKKYKLK; KKYKLKHIV; KYKLKHIVW; KLKHIVWAS; HIVWAS | |
| | REL; WASRELERF; ERFAVNPGL; RFAVNPGLL; AVNPGLLET; GLLE | |
| | TSEGC; ETSEGCRQI; ILGQLQPSL; GQLQPSLQT; SLQTGSEEL; LQT | |
| | GSEELR; GSEELRSLY; ELRSLYNTV; SLYNTVATL; LYNTVATLY; NT | |
| | VATLYCV; ATLYCVHQR; TLYCVHQRI; YCVHQRIEI; CVHQRIEIK; QR | |
| | IEIKDTK; EIKDTKEAL; ALDKIEEEQ; QQAAADTGH; HSNQVSQNY; N | |
| | QVSQNYPI; QVSQNYPIV; QNYPIVQNI; VQNIQGQMV; IQGQMVHQA; | |
| | MVHQAISPR; HQAISPRTL; AISPRTLNA; ISPRTLNAW; SPRTLNAW | |
| | V; RTLNAWVKV; TLNAWVKVV; AWVKVVEEK; EEKAFSPEV; EKAFS | |
| | PEVI; FSPEVIPMF; EVIPMFSAL; IPMFSALSE; ALSEGATPQ; SEGAT | |
| | PQDL; ATPQDLNTM; TPQDLNTML; DLNTMLNTV; NTVGGHQAA; TV | |
| | GGHQAAM; HQAAMQMLK; AMQMLKETI; ETINEEAAE; TINEEAAEW; | |
| | EEAAEWDRV; EAAEWDRVH; AEWDRVHPV; RVHPVHAGP; HPVHA | |
| | GPIA; DIAGTTSTL; TTSTLQEQI; STLQEQIGW; TLQEQIGWM; GWMT | |
| | NNPPI; MTNNPPIPV; NPPIPVGEI; PPIPVGEIY; IPVGEIYKR; GEIYKR | |
| | WII; EIYKRWIIL; YKRWIILGL; RWIILGLNK; WIILGLNKI; IILGLNKIV; GL | |
| | NKIVRMY; KIVRMYSPT; IVRMYSPTS; RMYSPTSIL; SPTSILDIR; SIL | |
| | DIRQGP; ILDIRQGPK; RQGPKEPFR; EPFRDYVDR; PFRDYVDRF; R | |
| | DYVDRFYK; DYVDRFYKT; YVDRFYKTL; VDRFYKTLR; RAEQASQE | |
| | V; QASQEVKNW; EVKNWMTET; NWMTETLLV; WMTETLLVQ; VQNA | |
| | NPDCK; TILKALGPA; ILKALGPAA; KALGPAATL; GPAATLEEM; ATLE | |
| | EMMTA; TLEEMMTAC; EEMMTACQG; EMMTACQGV; GVGGPGHK | |
| | A; GGPGHKARV; GPGHKARVL; KARVLAEAM; VLAEAMSQV; LAEAM | |
| | SQVT; AEAMSQVTN; AMSQVTNSA; SQVTNSATI; QVTNSATIM; VTN | |
| | SATIMM; NSATIMMQR; IMMQRGNFR; MMQRGNFRN; RGNFRNQR | |
| | K; FRNQRKIVK; NQRKIVKCF; IVKCFNCGK; EGHTARNCR; TARNCR | |
| | APR; ARNCRAPRK; RNCRAPRKK; APRKKGCWK; HQMKDCTER; R | |
| | QANFLGKI; QANFLGKIW; FLGKIWPSY; KIWPSYKGR; WPSYKGRP | |
| | G; SYKGRPGNF; KGRPGNFLQ; FLQSRPEPT; PTAPPEESF; TAPPE | |
| | ESFR; TPPQKQEPI; PIDKELYPL; KELYPLTSL; ELYPLTSLR; YPLTSL | |
| | RSL; SLFGNDPSS | |
| | 10-mers: | |
| | RASVLSGGEL; SVLSGGELDR; VLSGGELDRW; ELDRWEKIRL; KIRL | |
| | RPGGKK; RLRPGGKKKY; RPGGKKKYKL; KKYKLKHIVW; KLKHIVW | |
| | ASR; IVWASRELER; VWASRELERF; LERFAVNPGL; ERFAVNPGLL; | |
| | FAVNPGLLET; ETSEGCRQIL; RQILGQLQPS; QILGQLQPSL; ILGQL | |
| | QPSLQ; SLQTGSEELR; EELRSLYNTV; RSLYNTVATL; SLYNTVATL | |
| | Y; VATLYCVHQR; ATLYCVHQRI; LYCVHQRIEI; IEIKDTKEAL; AADT | |
| | GHSNQV; NQVSQNYPIV; SQNYPIVQNI; PIVQNIQGQM; IVQNIQGQ | |
| | MV; VQNIQGQMVH; NIQGQMVHQA; IQGQMVHQAI; QMVHQAISPR; | |
| | AISPRTLNAW; RTLNAWVKVV; NAWVKVVEEK; WVKVVEEKAF; VEE | |
| | KAFSPEV; EEKAFSPEVI; KAFSPEVIPM; AFSPEVIPMF; PEVIPMFSA | |
| | L; EVIPMFSALS; PMFSALSEGA; ATPQDLNTML; MLNTVGGHQA; NT | |
| | VGGHQAAM; GHQAAMQMLK; AAMQMLKETI; MLKETINEEA; ETINE | |
| | EAAEW; AAEWDRVHPV; RVHPVHAGPI; HPVHAGPIAP; IAPGQMRE | |
| | PR; TSTLQEQIGW; STLQEQIGWM; TLQEQIGWMT; WMTNNPPIPV; | |
| | NPPIPVGEIY; IPVGEIYKRW; GEIYKRWIIL; IYKRWIILGL; KRWIILGL | |
| | NK; RWIILGLNKI; WIILGLNKIV; IILGLNKIVR; ILGLNKIVRM; IVRMYSP | |
| | TSI; MYSPTSILDI; YSPTSILDIR; SILDIRQGPK; DIRQGPKEPF; EPFR | |
| | DYVDRF; DYVDRFYKTL; YVDRFYKTLR; RFYKTLRAEQ; RAEQASQ | |
| | EVK; EVKNWMTETL; WMTETLLVQN; LVQNANPDCK; KTILKALGPA; | |
| | TILKALGPAA; ILKALGPAAT; GPAATLEEMM; ATLEEMMTAC; TLEE | |
| | MMTACQ; EEMMTACQGV; VGGPGHKARV; RVLAEAMSQV; VLAEA | |
| | MSQVT; AEAMSQVTNS; EAMSQVTNSA; AMSQVTNSAT; SQVTNSA | |
| | TIM; QVTNSATIMM; TNSATIMMQR; ATIMMQRGNF; TIMMQRGNFR; | |
| | MMQRGNFRNQ; MQRGNFRNQR; NFRNQRKIVK; KIVKCFNCGK; KE | |
| | GHTARNCR; HTARNCRAPR; TARNCRAPRK; ARNCRAPRKK; RAPR | |
| | KKGCWK; APRKKGCWKC; RKKGCWKCGK; KCGKEGHQMK; QMKD | |
| | CTERQA; TERQANFLGK; RQANFLGKIW; FLGKIWPSYK; SYKGRPG | |
| | NFL; FLQSRPEPTA; EPTAPPEESF; PTAPPEESFR; EESFRSGVET; | |
| | GVETTTPPQK; TTPPQKQEPI; EPIDKELYPL; ELYPLTSLRS; LYPLTS | |
| | LRSL; YPLTSLRSLF; SLFGNDPSSQ | |
| | 11-mers: | |
| | VLSGGELDRWE; LSGGELDRWEK; GELDRWEKIRL; ELDRWEKIRL | |
| | R; KIRLRPGGKKK; RLRPGGKKKYK; HIVWASRELER; WASRELERF | |
| | AV; ELERFAVNPGL; LERFAVNPGLL; GLLETSEGCRQ; LLETSEGCR | |
| | QI; LETSEGCRQIL; SEGCRQILGQL; RQILGQLQPSL; ILGQLQPSLQ | |
| | T; QPSLQTGSEEL; LQTGSEELRSL; QTGSEELRSLY; SEELRSLYNT | |
| | V; RSLYNTVATLY; SLYNTVATLYC; LYNTVATLYCV; NTVATLYCVH | |
| | Q; TVATLYCVHQR; TLYCVHQRIEI; LYCVHQRIEIK; EIKDTKEALDK; | |
| | ALDKIEEEQNK; AAADTGHSNQV; HSNQVSQNYPI; YPIVQNIQGQM; | |
| | PIVQNIQGQMV; NIQGQMVHQAI; GQMVHQAISPR; MVHQAISPRTL; | |
| | QAISPRTLNAW; AISPRTLNAWV; ISPRTLNAWVK; SPRTLNAWVKV; | |
| | LNAWVKVVEEK; AWVKVVEEKAF; VVEEKAFSPEV; KAFSPEVIPMF; | |
| | FSPEVIPMFSA; SPEVIPMFSAL; EVIPMFSALSE; IPMFSALSEGA; A | |
| | LSEGATPQDL; EGATPQDLNTM; PQDLNTMLNTV; TMLNTVGGHQA; | |
| | MLNTVGGHQAA; TVGGHQAAMQM; GGHQAAMQMLK; QAAMQML | |
| | KETI; MQMLKETINEE; QMLKETINEEA; MLKETINEEAA; TINEEAAE | |
| | WDR; EAAEWDRVHPV; RVHPVHAGPIA; HPVHAGPIAPG; HAGPIAP | |
| | GQMR; TTSTLQEQIGW; QIGWMTNNPPI; IPVGEIYKRWI; EIYKRWII | |
| | LGL; KRWIILGLNKI; WIILGLNKIVR; IILGLNKIVRM; KIVRMYSPTSI; IV | |
| | RMYSPTSIL; RMYSPTSILDI; MYSPTSILDIR; TSILDIRQGPK; DIRQG | |
| | PKEPFR; RQGPKEPFRDY; QGPKEPFRDYV; EPFRDYVDRFY; PFR | |
| | DYVDRFYK; DYVDRFYKTLR; YVDRFYKTLRA; TLRAEQASQEV; AE | |
| | QASQEVKNW; QEVKNWMTETL; EVKNWMTETLL; WMTETLLVQNA; | |
| | LLVQNANPDCK; NANPDCKTILK; NPDCKTILKAL; KTILKALGPAA; IL | |
| | KALGPAATL; ALGPAATLEEM; EEMMTACQGVG; MTACQGVGGPG; | |
| | ACQGVGGPGHK; GVGGPGHKARV; KARVLAEAMSQ; AEAMSQVT | |
| | NSA; EAMSQVTNSAT; AMSQVTNSATI; MSQVTNSATIM; SQVTNSA | |
| | TIMM; VTNSATIMMQR; ATIMMQRGNFR; MMQRGNFRNQR; MQRG | |
| | NFRNQRK; FRNQRKIVKCF; HTARNCRAPRK; TARNCRAPRKK; EG | |
| | HQMKDCTER; CTERQANFLGK; TERQANFLGKI; NFLGKIWPSYK; W | |
| | PSYKGRPGNF; KGRPGNFLQSR; EPTAPPEESFR; RSGVETTTPPQ; | |
| | SGVETTTPPQK; TTTPPQKQEPI; QEPIDKELYPL; EPIDKELYPLT; D | |
| | KELYPLTSLR; ELYPLTSLRSL; LYPLTSLRSLF | |
| | 15-mer + 9-mer core: | |
| | AEAMSQVTNSATIMM; AMSQVTNSA; AEAMSQVTNSATIMM; MSQV | |
| | TNSAT; AEAMSQVTNSATIMM; QVTNSATIM; AFSPEVIPMFSALSE; | |
| | VIPMFSALS; AGPIAPGQMREPRGS; IAPGQMREP; AISPRTLNAWV | |
| | KVVE; PRTLNAWVK; AISPRTLNAWVKVVE; TLNAWVKVV; AMSQVT | |
| | NSATIMMQR; AMSQVTNSA; AMSQVTNSATIMMQR; VTNSATIMM; A | |
| | NFLGKIWPSYKGRP; FLGKIWPSY; ANFLGKIWPSYKGRP; GKIWPS | |
| | YKG; ANFLGKIWPSYKGRP; LGKIWPSYK; APPEESFRSGVETTT; SF | |
| | RSGVETT; ARVLAEAMSQVTNSA; LAEAMSQVT; ARVLAEAMSQVT | |
| | NSA; VLAEAMSQV; ASQEVKNWMTETLLV; VKNWMTETL; ASRELE | |
| | RFAVNPGLL; LERFAVNPG; ATIMMQRGNFRNQRK; IMMQRGNFR; | |
| | ATLEEMMTACQGVGG; LEEMMTACQ; ATPQDLNTMLNTVGG; LNT | |
| | MLNTVG; CKTILKALGPAATLE; ILKALGPAA; CKTILKALGPAATLE; L | |
| | KALGPAAT; CRQILGQLQPSLQTG; GQLQPSLQT; CRQILGQLQPSL | |
| | QTG; LGQLQPSLQ; DCKTILKALGPAATL; ILKALGPAA; DCKTILKAL | |
| | GPAATL; LKALGPAAT; DIAGTTSTLQEQIGW; IAGTTSTLQ; DKELYP | |
| | LTSLRSLFG; ELYPLTSLR; DKELYPLTSLRSLFG; LYPLTSLRS; DLN | |
| | TMLNTVGGHQAA; LNTMLNTVG; DLNTMLNTVGGHQAA; MLNTVG | |
| | GHQ; DRFYKTLRAEQASQE; DRFYKTLRA; DRFYKTLRAEQASQE; F | |
| | YKTLRAEQ; DRFYKTLRAEQASQE; YKTLRAEQA; DRVHPVHAGPIA | |
| | PGQ; VHAGPIAPG; DYVDRFYKTLRAEQA; DRFYKTLRA; DYVDRFY | |
| | KTLRAEQA; FYKTLRAEQ; DYVDRFYKTLRAEQA; VDRFYKTLR; DY | |
| | VDRFYKTLRAEQA; YVDRFYKTL; EAMSQVTNSATIMMQ; AMSQVT | |
| | NSA; EAMSQVTNSATIMMQ; VTNSATIMM; EELRSLYNTVATLYC; LR | |
| | SLYNTVA; EELRSLYNTVATLYC; LYNTVATLY; EESFRSGVETTTPP | |
| | Q; FRSGVETTT; EGCRQILGQLQPSLQ; CRQILGQLQ; EGCRQILGQ | |
| | LQPSLQ; ILGQLQPSL; EGCRQILGQLQPSLQ; RQILGQLQP; EIYKR | |
| | WIILGLNKIV; WIILGLNKI; EIYKRWIILGLNKIV; YKRWIILGL; ELERFA | |
| | VNPGLLETS; FAVNPGLLE; ELRSLYNTVATLYCV; LYNTVATLY; ELR | |
| | SLYNTVATLYCV; YNTVATLYC; ELYPLTSLRSLFGND; LTSLRSLFG; | |
| | ELYPLTSLRSLFGND; LYPLTSLRS; EPIDKELYPLTSLRS; IDKELYPL | |
| | T; EPRGSDIAGTTSTLQ; EPRGSDIAG; EPRGSDIAGTTSTLQ; GSDIA | |
| | GTTS; EPRGSDIAGTTSTLQ; RGSDIAGTT; EQASQEVKNWMTETL; | |
| | EVKNWMTET; EQASQEVKNWMTETL; SQEVKNWMT; EQIGWMTN | |
| | NPPIPVG; IGWMTNNPP; EQIGWMTNNPPIPVG; MTNNPPIPV; ERFA | |
| | VNPGLLETSEG; FAVNPGLLE; ERFAVNPGLLETSEG; VNPGLLETS; | |
| | ERQANFLGKIWPSYK; FLGKIWPSY; ESFRSGVETTTPPQK; FRSGV | |
| | ETTT; ETLLVQNANPDCKTI; VQNANPDCK; EVIPMFSALSEGATP; IP | |
| | MFSALSE; EVIPMFSALSEGATP; MFSALSEGA; EVIPMFSALSEGAT | |
| | P; VIPMFSALS; EVKNWMTETLLVQNA; NWMTETLLV; EVKNWMTET | |
| | LLVQNA; WMTETLLVQ; FAVNPGLLETSEGCR; VNPGLLETS; FLGKI | |
| | WPSYKGRPGN; FLGKIWPSY; FLGKIWPSYKGRPGN; GKIWPSYKG; | |
| | FLGKIWPSYKGRPGN; LGKIWPSYK; FLQSRPEPTAPPEES; FLQS | |
| | RPEPT; FRNQRKIVKCFNCGK; FRNQRKIVK; FRSGVETTTPPQKQE; | |
| | VETTTPPQK; FSPEVIPMFSALSEG; VIPMFSALS; FYKTLRAEQASQ | |
| | EVK; FYKTLRAEQ; FYKTLRAEQASQEVK; YKTLRAEQA; GATPQDL | |
| | NTMLNTVG; DLNTMLNTV; GATPQDLNTMLNTVG; PQDLNTMLN; G | |
| | CRQILGQLQPSLQT; LGQLQPSLQ; GEIYKRWIILGLNKI; IYKRWIILG; | |
| | GEIYKRWIILGLNKI; YKRWIILGL; GGHQAAMQMLKETIN; AAMQML | |
| | KET; GHKARVLAEAMSQVT; VLAEAMSQV; GKIWPSYKGRPGNFL; | |
| | GKIWPSYKG; GKKKYKLKHIVWASR; YKLKHIVWA; GLNKIVRMYSP | |
| | TSIL; IVRMYSPTS; GLNKIVRMYSPTSIL; LNKIVRMYS; GLNKIVRMY | |
| | SPTSIL; VRMYSPTSI; GNFLQSRPEPTAPPE; FLQSRPEPT; GNFRN | |
| | QRKIVKCFNC; FRNQRKIVK; GPAATLEEMMTACQG; LEEMMTACQ; | |
| | GQLQPSLQTGSEELR; GQLQPSLQT; GQMVHQAISPRTLNA; MVHQ | |
| | AISPR; GQMVHQAISPRTLNA; VHQAISPRT; GRPGNFLQSRPEPTA; | |
| | FLQSRPEPT; GSDIAGTTSTLQEQI; IAGTTSTLQ; GSEELRSLYNTVA | |
| | TL; LRSLYNTVA; GTTSTLQEQIGWMTN; LQEQIGWMT; GWMTNNP | |
| | PIPVGEIY; MTNNPPIPV; HKARVLAEAMSQVTN; LAEAMSQVT; HPV | |
| | HAGPIAPGQMRE; VHAGPIAPG; IAGTTSTLQEQIGWM; IAGTTSTLQ; | |
| | IDKELYPLTSLRSLF; LYPLTSLRS; IGWMTNNPPIPVGEI; IGWMTNN | |
| | PP; IGWMTNNPPIPVGEI; MTNNPPIPV; IGWMTNNPPIPVGEI; WMT | |
| | NNPPIP; IILGLNKIVRMYSPT; ILGLNKIVR; IILGLNKIVRMYSPT; LGL | |
| | NKIVRM; IILGLNKIVRMYSPT; LNKIVRMYS; ILGLNKIVRMYSPTS; IL | |
| | GLNKIVR; ILGLNKIVRMYSPTS; LGLNKIVRM; ILGLNKIVRMYSPTS; | |
| | LNKIVRMYS; ILGQLQPSLQTGSEE; GQLQPSLQT; ILGQLQPSLQTG | |
| | SEE; LGQLQPSLQ; ILKALGPAATLEEMM; LKALGPAAT; IMMQRGNF | |
| | RNQRKIV; IMMQRGNFR; IPMFSALSEGATPQD; MFSALSEGA; IPVG | |
| | EIYKRWIILGL; IYKRWIILG; IQGQMVHQAISPRTL; MVHQAISPR; IQG | |
| | QMVHQAISPRTL; VHQAISPRT; ISPRTLNAWVKVVEE; LNAWVKVV | |
| | E; ISPRTLNAWVKVVEE; TLNAWVKVV; IVQNIQGQMVHQAIS; IQGQ | |
| | MVHQA; IVRMYSPTSILDIRQ; IVRMYSPTS; IVRMYSPTSILDIRQ; VR | |
| | MYSPTSI; IVRMYSPTSILDIRQ; YSPTSILDI; IWPSYKGRPGNFLQS; | |
| | YKGRPGNFL; IYKRWIILGLNKIVR; WIILGLNKI; IYKRWIILGLNKIVR; | |
| | YKRWIILGL; KAFSPEVIPMFSALS; EVIPMFSAL; KAFSPEVIPMFSAL | |
| | S; FSPEVIPMF; KAFSPEVIPMFSALS; KAFSPEVIP; KALGPAATLEE | |
| | MMTA; LGPAATLEE; KARVLAEAMSQVTNS; LAEAMSQVT; KELYPL | |
| | TSLRSLFGN; ELYPLTSLR; KELYPLTSLRSLFGN; LYPLTSLRS; KGR | |
| | PGNFLQSRPEPT; GRPGNFLQS; KGRPGNFLQSRPEPT; NFLQSRP | |
| | EP; KIVRMYSPTSILDIR; IVRMYSPTS; KIVRMYSPTSILDIR; VRMYS | |
| | PTSI; KIVRMYSPTSILDIR; YSPTSILDI; KIWPSYKGRPGNFLQ; YKG | |
| | RPGNFL; KKKYKLKHIVWASRE; LKHIVWASR; KKKYKLKHIVWASR | |
| | E; YKLKHIVWA; KKYKLKHIVWASREL; LKHIVWASR; KKYKLKHIVW | |
| | ASREL; YKLKHIVWA; KLKHIVWASRELERF; LKHIVWASR; KNWMTE | |
| | TLLVQNANP; WMTETLLVQ; KRWIILGLNKIVRMY; ILGLNKIVR; KRW | |
| | IILGLNKIVRMY; LGLNKIVRM; KRWIILGLNKIVRMY; WIILGLNKI; KTIL | |
| | KALGPAATLEE; ILKALGPAA; KTILKALGPAATLEE; LKALGPAAT; KY | |
| | KLKHIVWASRELE; LKHIVWASR; LAEAMSQVTNSATIM; AMSQVTN | |
| | SA; LAEAMSQVTNSATIM; LAEAMSQVT; LEEMMTACQGVGGPG; M | |
| | TACQGVGG; LERFAVNPGLLETSE; FAVNPGLLE; LERFAVNPGLLE | |
| | TSE; VNPGLLETS; LGKIWPSYKGRPGNF; LGKIWPSYK; LGLNKIVR | |
| | MYSPTSI; IVRMYSPTS; LGLNKIVRMYSPTSI; LGLNKIVRM; LGLNKI | |
| | VRMYSPTSI; LNKIVRMYS; LGPAATLEEMMTACQ; AATLEEMMT; LG | |
| | QLQPSLQTGSEEL; LGQLQPSLQ; LKALGPAATLEEMMT; LKALGPA | |
| | AT; LKHIVWASRELERFA; LKHIVWASR; LLVQNANPDCKTILK; VQN | |
| | ANPDCK; LNKIVRMYSPTSILD; IVRMYSPTS; LNKIVRMYSPTSILD; L | |
| | NKIVRMYS; LNKIVRMYSPTSILD; VRMYSPTSI; LNTMLNTVGGHQA | |
| | AM; LNTMLNTVG; LNTMLNTVGGHQAAM; MLNTVGGHQ; LNTVGG | |
| | HQAAMQMLK; VGGHQAAMQ; LQEQIGWMTNNPPIP; IGWMTNNPP; | |
| | LRSLYNTVATLYCVH; LYNTVATLY; LRSLYNTVATLYCVH; YNTVAT | |
| | LYC; LTSLRSLFGNDPSSQ; LTSLRSLFG; LYNTVATLYCVHQRI; LYN | |
| | TVATLY; LYNTVATLYCVHQRI; YNTVATLYC; LYPLTSLRSLFGNDP; | |
| | LTSLRSLFG; LYPLTSLRSLFGNDP; LYPLTSLRS; MFSALSEGATPQ | |
| | DLN; MFSALSEGA; MGARASVLSGGELDR; MGARASVLS; MLNTVG | |
| | GHQAAMQML; MLNTVGGHQ; MLNTVGGHQAAMQML; VGGHQAA | |
| | MQ; MMQRGNFRNQRKIVK; NFRNQRKIV; MMQRGNFRNQRKIVK; Q | |
| | RGNFRNQR; MMQRGNFRNQRKIVK; RGNFRNQRK; MQRGNFRNQ | |
| | RKIVKC; FRNQRKIVK; MSQVTNSATIMMQRG; VTNSATIMM; MTETL | |
| | LVQNANPDCK; LLVQNANPD; MTETLLVQNANPDCK; MTETLLVQN; | |
| | MTNNPPIPVGEIYKR; MTNNPPIPV; MVHQAISPRTLNAWV; MVHQAI | |
| | SPR; MVHQAISPRTLNAWV; VHQAISPRT; NFLGKIWPSYKGRPG; F | |
| | LGKIWPSY; NFLGKIWPSYKGRPG; GKIWPSYKG; NFLGKIWPSYKG | |
| | RPG; LGKIWPSYK; NFLQSRPEPTAPPEE; FLQSRPEPT; NFRNQRKI | |
| | VKCFNCG; FRNQRKIVK; NIQGQMVHQAISPRT; IQGQMVHQA; NIQ | |
| | GQMVHQAISPRT; MVHQAISPR; NKIVRMYSPTSILDI; IVRMYSPTS; | |
| | NKIVRMYSPTSILDI; VRMYSPTSI; NPDCKTILKALGPAA; CKTILKAL | |
| | G; NPDCKTILKALGPAA; KTILKALGP; NSATIMMQRGNFRNQ; IMMQ | |
| | RGNFR; NTMLNTVGGHQAAMQ; LNTVGGHQA; NTMLNTVGGHQA | |
| | AMQ; MLNTVGGHQ; NTVGGHQAAMQMLKE; VGGHQAAMQ; NYPIV | |
| | QNIQGQMVHQ; VQNIQGQMV; PDCKTILKALGPAAT; CKTILKALG; P | |
| | DCKTILKALGPAAT; ILKALGPAA; PEESFRSGVETTTPP; FRSGVET | |
| | TT; PEVIPMFSALSEGAT; VIPMFSALS; PGHKARVLAEAMSQV; ARV | |
| | LAEAMS; PGNFLQSRPEPTAPP; FLQSRPEPT; PIDKELYPLTSLRSL; | |
| | LYPLTSLRS; PIVQNIQGQMVHQAI; VQNIQGQMV; PLTSLRSLFGN | |
| | DPSS; LTSLRSLFG; PMFSALSEGATPQDL; MFSALSEGA; PPEESF | |
| | RSGVETTTP; FRSGVETTT; PQDLNTMLNTVGGHQ; DLNTMLNTV; P | |
| | QDLNTMLNTVGGHQ; LNTMLNTVG; PRGSDIAGTTSTLQE; IAGTTS | |
| | TLQ; PRTLNAWVKVVEEKA; LNAWVKVVE; PRTLNAWVKVVEEKA; T | |
| | LNAWVKVV; PSYKGRPGNFLQSRP; YKGRPGNFL; PVGEIYKRWIIL | |
| | GLN; YKRWIILGL; PVHAGPIAPGQMREP; VHAGPIAPG; PAATLEEM | |
| | MTACQGV; LEEMMTACQ; QAISPRTLNAWVKVV; ISPRTLNAW; QA | |
| | NFLGKIWPSYKGR; FLGKIWPSY; QANFLGKIWPSYKGR; GKIWPSY | |
| | KG; QANFLGKIWPSYKGR; LGKIWPSYK; QASQEVKNWMTETLL; VK | |
| | NWMTETL; QDLNTMLNTVGGHQA; LNTMLNTVG; QDLNTMLNTVG | |
| | GHQA; MLNTVGGHQ; QEQIGWMTNNPPIPV; IGWMTNNPP; QEVKN | |
| | WMTETLLVQN; VKNWMTETL; QGQMVHQAISPRTLN; MVHQAISPR; | |
| | QGQMVHQAISPRTLN; VHQAISPRT; QIGWMTNNPPIPVGE; IGWM | |
| | TNNPP; QIGWMTNNPPIPVGE; MTNNPPIPV; QIGWMTNNPPIPVGE; | |
| | WMTNNPPIP; QILGQLQPSLQTGSE; GQLQPSLQT; QILGQLQPSL | |
| | QTGSE; LGQLQPSLQ; QMVHQAISPRTLNAW; MVHQAISPR; QMVH | |
| | QAISPRTLNAW; VHQAISPRT; QNIQGQMVHQAISPR; IQGQMVHQA; | |
| | QNYPIVQNIQGQMVH; VQNIQGQMV; QRGNFRNQRKIVKCF; FRN | |
| | QRKIVK; QTGSEELRSLYNTVA; SEELRSLYN; QVTNSATIMMQRGN | |
| | F; VTNSATIMM; RDYVDRFYKTLRAEQ; DRFYKTLRA; RDYVDRFYK | |
| | TLRAEQ; DYVDRFYKT; RDYVDRFYKTLRAEQ; VDRFYKTLR; RELE | |
| | RFAVNPGLLET; FAVNPGLLE; RELERFAVNPGLLET; LERFAVNPG; | |
| | RFAVNPGLLETSEGC; FAVNPGLLE; RFAVNPGLLETSEGC; VNPGL | |
| | LETS; RFYKTLRAEQASQEV; FYKTLRAEQ; RFYKTLRAEQASQEV; | |
| | YKTLRAEQA; RGNFRNQRKIVKCFN; FRNQRKIVK; RGSDIAGTTST | |
| | LQEQ; IAGTTSTLQ; RMYSPTSILDIRQGP; YSPTSILDI; RPGNFLQSR | |
| | PEPTAP; FLQSRPEPT; RQANFLGKIWPSYKG; FLGKIWPSY; RQAN | |
| | FLGKIWPSYKG; LGKIWPSYK; RQILGQLQPSLQTGS; GQLQPSLQT; | |
| | RQILGQLQPSLQTGS; LGQLQPSLQ; RSGVETTTPPQKQEP; VETTT | |
| | PPQK; RSLYNTVATLYCVHQ; LYNTVATLY; RSLYNTVATLYCVHQ; Y | |
| | NTVATLYC; RTLNAWVKVVEEKAF; LNAWVKVVE; RTLNAWVKVVE | |
| | EKAF; TLNAWVKVV; RVHPVHAGPIAPGQM; VHAGPIAPG; RVLAEA | |
| | MSQVTNSAT; AMSQVTNSA; RVLAEAMSQVTNSAT; LAEAMSQVT; | |
| | RWIILGLNKIVRMYS; ILGLNKIVR; RWIILGLNKIVRMYS; LGLNKIVR | |
| | M; RWIILGLNKIVRMYS; WIILGLNKI; SATIMMQRGNFRNQR; IMMQR | |
| | GNFR; SDIAGTTSTLQEQIG; IAGTTSTLQ; SEELRSLYNTVATLY; LR | |
| | SLYNTVA; SFRSGVETTTPPQKQ; FRSGVETTT; SFRSGVETTTPPQ | |
| | KQ; VETTTPPQK; SGVETTTPPQKQEPI; VETTTPPQK; SLYNTVATL | |
| | YCVHQR; LYNTVATLY; SLYNTVATLYCVHQR; YNTVATLYC; SPEVI | |
| | PMFSALSEGA; VIPMFSALS; SPRTLNAWVKVVEEK; LNAWVKVVE; | |
| | SPRTLNAWVKVVEEK; TLNAWVKVV; SQEVKNWMTETLLVQ; VKN | |
| | WMTETL; SQNYPIVQNIQGQMV; IVQNIQGQM; SQNYPIVQNIQGQM | |
| | V; SQNYPIVQN; SQVTNSATIMMQRGN; VTNSATIMM; SRELERFAV | |
| | NPGLLE; LERFAVNPG; STLQEQIGWMTNNPP; LQEQIGWMT; STLQ | |
| | EQIGWMTNNPP; QIGWMTNNP; SYKGRPGNFLQSRPE; YKGRPGN | |
| | FL; TERQANFLGKIWPSY; ANFLGKIWP; TETLLVQNANPDCKT; VQN | |
| | ANPDCK; TGSEELRSLYNTVAT; LRSLYNTVA; TILKALGPAATLEEM; | |
| | LKALGPAAT; TIMMQRGNFRNQRKI; IMMQRGNFR; TLEEMMTACQ | |
| | GVGGP; MTACQGVGG; TLLVQNANPDCKTIL; VQNANPDCK; TLNA | |
| | WVKVVEEKAFS; LNAWVKVVE; TLQEQIGWMTNNPPI; IGWMTNNP | |
| | P; TMLNTVGGHQAAMQM; MLNTVGGHQ; TMLNTVGGHQAAMQM; | |
| | VGGHQAAMQ; TNSATIMMQRGNFRN; IMMQRGNFR; TPQDLNTML | |
| | NTVGGH; LNTMLNTVG; TSTLQEQIGWMTNNP; LQEQIGWMT; TTST | |
| | LQEQIGWMTNN; LQEQIGWMT; TVGGHQAAMQMLKET; VGGHQAA | |
| | MQ; VDRFYKTLRAEQASQ; DRFYKTLRA; VDRFYKTLRAEQASQ; FY | |
| | KTLRAEQ; VDRFYKTLRAEQASQ; YKTLRAEQA; VGEIYKRWIILGLN | |
| | K; YKRWIILGL; VGGHQAAMQMLKETI; VGGHQAAMQ; VHAGPIAPG | |
| | QMREPR; VHAGPIAPG; VHPVHAGPIAPGQMR; VHAGPIAPG; VHQA | |
| | ISPRTLNAWVK; VHQAISPRT; VIPMFSALSEGATPQ; MFSALSEGA; | |
| | VIPMFSALSEGATPQ; VIPMFSALS; VKNWMTETLLVQNAN; NWMTE | |
| | TLLV; VKNWMTETLLVQNAN; WMTETLLVQ; VLAEAMSQVTNSATI; | |
| | AMSQVTNSA; VLAEAMSQVTNSATI; LAEAMSQVT; VQNIQGQMVH | |
| | QAISP; IQGQMVHQA; VRMYSPTSILDIRQG; MYSPTSILD; VRMYSP | |
| | TSILDIRQG; VRMYSPTSI; VRMYSPTSILDIRQG; YSPTSILDI; VTNSA | |
| | TIMMQRGNFR; SATIMMQRG; VTNSATIMMQRGNFR; VTNSATIMM; | |
| | WDRVHPVHAGPIAPG; VHPVHAGPI; WIILGLNKIVRMYSP; ILGLNKI | |
| | VR; WIILGLNKIVRMYSP; LGLNKIVRM; WIILGLNKIVRMYSP; LNKIV | |
| | RMYS; WIILGLNKIVRMYSP; WIILGLNKI; WMTNNPPIPVGEIYK; MTN | |
| | NPPIPV; WPSYKGRPGNFLQSR; YKGRPGNFL; YKGRPGNFLQSRP | |
| | EP; YKGRPGNFL; YKLKHIVWASRELER; LKHIVWASR; YKRWIILGL | |
| | NKIVRM; ILGLNKIVR; YKRWIILGLNKIVRM; WIILGLNKI; YKTLRAEQ | |
| | ASQEVKN; YKTLRAEQA; YNTVATLYCVHQRIE; YNTVATLYC; YPIV | |
| | QNIQGQMVHQA; VQNIQGQMV; YPLTSLRSLFGNDPS; LTSLRSLF | |
| | G; YVDRFYKTLRAEQAS; DRFYKTLRA; YVDRFYKTLRAEQAS; FYK | |
| | TLRAEQ; YVDRFYKTLRAEQAS; YKTLRAEQA; AATLEEMMTACQG | |
| | VG; LEEMMTACQ | |
| NP_057851 Vif | 8-mers: | 4963-5538 |
| | MENRWQVM; RWQVMIVW; WQVMIVWQ; QVMIVWQV; MIVWQVDR; | |
| | IVWQVDRM; WQVDRMRI; RMRIRTWK; RIRTWKSL; RTWKSLVK; K | |
| | SLVKHHM; SLVKHHMY; LVKHHMYV; HMYVSGKA; MYVSGKAR; VS | |
| | GKARGW; KARGWFYR; GWFYRHHY; HYESPHPR; YESPHPRI; SPH | |
| | PRISS; HPRISSEV; RISSEVHI; HIPLGDAR; IPLGDARL; PLGDARLV; | |
| | ARLVITTY; RLVITTYW; VITTYWGL; TTYWGLHT; HLGQGVSI; QGVSI | |
| | EWR; GVSIEWRK; VSIEWRKK; SIEWRKKR; TQVDPELA; DPELADQL; | |
| | LADQLIHL; DQLIHLYY; QLIHLYYF; HLYYFDCF; DCFSDSAI; CFSDS | |
| | AIR; FSDSAIRK; KALLGHIV; ALLGHIVS; LGHIVSPR; IVSPRCEY; EYQ | |
| | AGHNK; YQAGHNKV; KVGSLQYL; SLQYLALA; LQYLALAA; QYLALA | |
| | AL; YLALAALI; ALAALITP; LAALITPK; AALITPKK; ALITPKKI; PLPSVT | |
| | KL; LPSVTKLT; VTKLTEDR; LTEDRWNK; PQKTKGHR | |
| | 9-mers: | |
| | WQVMIVWQV; VMIVWQVDR; MIVWQVDRM; IVWQVDRMR; VWQV | |
| | DRMRI; WQVDRMRIR; RMRIRTWKS; RIRTWKSLV; IRTWKSLVK; RT | |
| | WKSLVKH; KSLVKHHMY; SLVKHHMYV; KHHMYVSGK; HMYVSGKA | |
| | R; SGKARGWFY; KARGWFYRH; RGWFYRHHY; HHYESPHPR; SPH | |
| | PRISSE; HPRISSEVH; ISSEVHIPL; SEVHIPLGD; HIPLGDARL; IPLGD | |
| | ARLV; PLGDARLVI; DARLVITTY; LVITTYWGL; WHLGQGVSI; LGQG | |
| | VSIEW; GQGVSIEWR; GVSIEWRKK; VSIEWRKKR; ELADQLIHL; LAD | |
| | QLIHLY; DQLIHLYYF; IHLYYFDCF; HLYYFDCFS; DCFSDSAIR; ALLG | |
| | HIVSP; LLGHIVSPR; HIVSPRCEY; KVGSLQYLA; SLQYLALAA; LQYL | |
| | ALAAL; QYLALAALI; YLALAALIT; ALAALITPK; LAALITPKK; ALITPKKI | |
| | K; TPKKIKPPL; KIKPPLPSV; SVTKLTEDR; VTKLTEDRW; KLTEDRW | |
| | NK; RWNKPQKTK; KPQKTKGHR; KTKGHRGSH | |
| | 10-mers: | |
| | MENRWQVMIV; RWQVMIVWQV; QVMIVWQVDR; VMIVWQVDRM; | |
| | MIVWQVDRMR; IVWQVDRMRI; VWQVDRMRIR; WQVDRMRIRT; R | |
| | MRIRTWKSL; RIRTWKSLVK; KSLVKHHMYV; SLVKHHMYVS; MYVS | |
| | GKARGW; YVSGKARGWF; VSGKARGWFY; SGKARGWFYR; RHHY | |
| | ESPHPR; HHYESPHPRI; YESPHPRISS; SPHPRISSEV; HPRISSEVH | |
| | I; RISSEVHIPL; EVHIPLGDAR; HIPLGDARLV; IPLGDARLVI; PLGDAR | |
| | LVIT; RLVITTYWGL; TTYWGLHTGE; TYWGLHTGER; HLGQGVSIE | |
| | W; GQGVSIEWRK; GVSIEWRKKR; VSIEWRKKRY; RYSTQVDPEL; Q | |
| | VDPELADQL; DPELADQLIH; PELADQLIHL; ELADQLIHLY; LADQLIH | |
| | LYY; YYFDCFSDSA; YFDCFSDSAI; FDCFSDSAIR; AIRKALLGHI; ALL | |
| | GHIVSPR; LLGHIVSPRC; IVSPRCEYQA; CEYQAGHNKV; KVGSLQY | |
| | LAL; SLQYLALAAL; LQYLALAALI; YLALAALITP; LALAALITPK; ALAAL | |
| | ITPKK; AALITPKKIK; KKIKPPLPSV; KPPLPSVTKL; KTKGHRGSHT | |
| | 11-mers: | |
| | MENRWQVMIVW; NRWQVMIVWQV; WQVMIVWQVDR; QVMIVWQ | |
| | VDRM; VMIVWQVDRMR; MIVWQVDRMRI; IVWQVDRMRIR; WQVD | |
| | RMRIRTW; QVDRMRIRTWK; RMRIRTWKSLV; MRIRTWKSLVK; RIR | |
| | TWKSLVKH; RTWKSLVKHHM; TWKSLVKHHMY; WKSLVKHHMYV; | |
| | LVKHHMYVSGK; KHHMYVSGKAR; HMYVSGKARGW; MYVSGKAR | |
| | GWF; YVSGKARGWFY; VSGKARGWFYR; KARGWFYRHHY; ESPH | |
| | PRISSEV; EVHIPLGDARL; IPLGDARLVIT; PLGDARLVITT; ARLVITT | |
| | YWGL; RLVITTYWGLH; LVITTYWGLHT; TTYWGLHTGER; YWGLHT | |
| | GERDW; GLHTGERDWHL; WHLGQGVSIEW; HLGQGVSIEWR; KRY | |
| | STQVDPEL; TQVDPELADQL; QVDPELADQLI; DPELADQLIHL; PELA | |
| | DQLIHLY; ELADQLIHLYY; LADQLIHLYYF; QLIHLYYFDCF; YYFDCF | |
| | SDSAI; AIRKALLGHIV; KALLGHIVSPR; ALLGHIVSPRC; HIVSPRCEY | |
| | QA; YQAGHNKVGSL; KVGSLQYLALA; GSLQYLALAAL; SLQYLALAA | |
| | LI; LQYLALAALIT; YLALAALITPK; LALAALITPKK; ALAALITPKKI; LAA | |
| | LITPKKIK; LITPKKIKPPL; KIKPPLPSVTK; VTKLTEDRWNK; KLTEDR | |
| | WNKPQ; LTEDRWNKPQK; KTKGHRGSHTM | |
| | 15-mer + 9-mer core: | |
| | ADQLIHLYYFDCFSD; IHLYYFDCF; AGHNKVGSLQYLALA; VGSLQY | |
| | LAL; AIRKALLGHIVSPRC; LLGHIVSPR; AIRKALLGHIVSPRC; RKALL | |
| | GHIV; ALLGHIVSPRCEYQA; LLGHIVSPR; ARLVITTYWGLHTGE; LVI | |
| | TTYWGL; ARLVITTYWGLHTGE; VITTYWGLH; CEYQAGHNKVGSL | |
| | QY; YQAGHNKVG; CFSDSAIRKALLGHI; AIRKALLGH; DARLVITTYW | |
| | GLHTG; LVITTYWGL; DARLVITTYWGLHTG; VITTYWGLH; DQLIHLY | |
| | YFDCFSDS; IHLYYFDCF; DRMRIRTWKSLVKHH; IRTWKSLVK; DSAI | |
| | RKALLGHIVSP; AIRKALLGH; DSAIRKALLGHIVSP; IRKALLGHI; DW | |
| | HLGQGVSIEWRKK; LGQGVSIEW; ELADQLIHLYYFDCF; LIHLYYFD | |
| | C; ENRWQVMIVWQVDRM; NRWQVMIVW; ENRWQVMIVWQVDRM; | |
| | VMIVWQVDR; ENRWQVMIVWQVDRM; WQVMIVWQV; ERDWHLG | |
| | QGVSIEWR; WHLGQGVSI; EVHIPLGDARLVITT; IPLGDARLV; EYQA | |
| | GHNKVGSLQYL; YQAGHNKVG; FSDSAIRKALLGHIV; AIRKALLGH; | |
| | FSDSAIRKALLGHIV; IRKALLGHI; FYRHHYESPHPRISS; YESPHPRI | |
| | S; GDARLVITTYWGLHT; LVITTYWGL; GDARLVITTYWGLHT; VITTY | |
| | WGLH; GERDWHLGQGVSIEW; WHLGQGVSI; GHNKVGSLQYLALA | |
| | A; VGSLQYLAL; GQGVSIEWRKKRYST; VSIEWRKKR; GSLQYLALA | |
| | ALITPK; LALAALITP; GSLQYLALAALITPK; YLALAALIT; GVSIEWRKK | |
| | RYSTQV; IEWRKKRYS; GVSIEWRKKRYSTQV; VSIEWRKKR; GVSI | |
| | EWRKKRYSTQV; WRKKRYSTQ; HHMYVSGKARGWFYR; YVSGKA | |
| | RGW; HHYESPHPRISSEVH; YESPHPRIS; HIPLGDARLVITTYW; LG | |
| | DARLVIT; HLGQGVSIEWRKKRY; VSIEWRKKR; HMYVSGKARGWF | |
| | YRH; YVSGKARGW; HNKVGSLQYLALAAL; VGSLQYLAL; IEWRKKR | |
| | YSTQVDPE; WRKKRYSTQ; IKPPLPSVTKLTEDR; IKPPLPSVT; IPLG | |
| | DARLVITTYWG; LGDARLVIT; IRKALLGHIVSPRCE; LGHIVSPRC; IR | |
| | KALLGHIVSPRCE; LLGHIVSPR; IRTWKSLVKHHMYVS; IRTWKSLV | |
| | K; IRTWKSLVKHHMYVS; WKSLVKHHM; ISSEVHIPLGDARLV; HIPL | |
| | GDARL; ITPKKIKPPLPSVTK; IKPPLPSVT; ITTYWGLHTGERDWH; Y | |
| | WGLHTGER; IVWQVDRMRIRTWKS; VDRMRIRTW; IVWQVDRMRIR | |
| | TWKS; WQVDRMRIR; KALLGHIVSPRCEYQ; LLGHIVSPR; KHHMYV | |
| | SGKARGWFY; YVSGKARGW; KIKPPLPSVTKLTED; IKPPLPSVT; KK | |
| | IKPPLPSVTKLTE; IKPPLPSVT; KKRYSTQVDPELADQ; TQVDPELA | |
| | D; KSLVKHHMYVSGKAR; VKHHMYVSG; KVGSLQYLALAALIT; LQY | |
| | LALAAL; KVGSLQYLALAALIT; QYLALAALI; LADQLIHLYYFDCFS; IH | |
| | LYYFDCF; LALAALITPKKIKPP; LAALITPKK; LGDARLVITTYWGLH; L | |
| | GDARLVIT; LGDARLVITTYWGLH; LVITTYWGL; LGQGVSIEWRKKR | |
| | YS; VSIEWRKKR; LITPKKIKPPLPSVT; KKIKPPLPS; LITPKKIKPPLP | |
| | SVT; PKKIKPPLP; LLGHIVSPRCEYQAG; LLGHIVSPR; LQYLALAALI | |
| | TPKKI; LALAALITP; LQYLALAALITPKKI; LAALITPKK; LQYLALAALIT | |
| | PKKI; YLALAALIT; LVITTYWGLHTGERD; VITTYWGLH; LVITTYWGL | |
| | HTGERD; YWGLHTGER; LVKHHMYVSGKARGW; VKHHMYVSG; ME | |
| | NRWQVMIVWQVDR; WQVMIVWQV; MIVWQVDRMRIRTWK; IVWQ | |
| | VDRMR; MIVWQVDRMRIRTWK; MIVWQVDRM; MIVWQVDRMRIRT | |
| | WK; WQVDRMRIR; MRIRTWKSLVKHHMY; IRTWKSLVK; MRIRTWK | |
| | SLVKHHMY; WKSLVKHHM; MYVSGKARGWFYRHH; GKARGWFYR; | |
| | MYVSGKARGWFYRHH; YVSGKARGW; NKVGSLQYLALAALI; LQY | |
| | LALAAL; NRWQVMIVWQVDRMR; MIVWQVDRM; NRWQVMIVWQV | |
| | DRMR; WQVMIVWQV; PKKIKPPLPSVTKLT; IKPPLPSVT; PLGDARL | |
| | VITTYWGL; ARLVITTYW; PLGDARLVITTYWGL; LGDARLVIT; PRCE | |
| | YQAGHNKVGSL; YQAGHNKVG; QAGHNKVGSLQYLAL; NKVGSLQ | |
| | YL; QGVSIEWRKKRYSTQ; IEWRKKRYS; QGVSIEWRKKRYSTQ; SI | |
| | EWRKKRY; QGVSIEWRKKRYSTQ; VSIEWRKKR; QLIHLYYFDCFS | |
| | DSA; IHLYYFDCF; QVDRMRIRTWKSLVK; DRMRIRTWK; QVDRMRI | |
| | RTWKSLVK; MRIRTWKSL; QVDRMRIRTWKSLVK; RMRIRTWKS; Q | |
| | VMIVWQVDRMRIRT; IVWQVDRMR; QVMIVWQVDRMRIRT; MIVWQ | |
| | VDRM; QYLALAALITPKKIK; LALAALITP; QYLALAALITPKKIK; LAALI | |
| | TPKK; QYLALAALITPKKIK; YLALAALIT; RCEYQAGHNKVGSLQ; YQ | |
| | AGHNKVG; RDWHLGQGVSIEWRK; WHLGQGVSI; RHHYESPHPRI | |
| | SSEV; YESPHPRIS; RIRTWKSLVKHHMYV; IRTWKSLVK; RIRTWKS | |
| | LVKHHMYV; WKSLVKHHM; RKALLGHIVSPRCEY; LGHIVSPRC; RK | |
| | ALLGHIVSPRCEY; LLGHIVSPR; RKKRYSTQVDPELAD; KKRYSTQV | |
| | D; RLVITTYWGLHTGER; ITTYWGLHT; RLVITTYWGLHTGER; VITTY | |
| | WGLH; RMRIRTWKSLVKHHM; IRTWKSLVK; RMRIRTWKSLVKHHM; | |
| | RTWKSLVKH; RTWKSLVKHHMYVSG; WKSLVKHHM; RWQVMIVW | |
| | QVDRMRI; MIVWQVDRM; RWQVMIVWQVDRMRI; WQVMIVWQV; S | |
| | AIRKALLGHIVSPR; AIRKALLGH; SAIRKALLGHIVSPR; RKALLGHIV; | |
| | SDSAIRKALLGHIVS; AIRKALLGH; SDSAIRKALLGHIVS; IRKALLGHI; | |
| | SEVHIPLGDARLVIT; IPLGDARLV; SIEWRKKRYSTQVDP; WRKKR | |
| | YSTQ; SLQYLALAALITPKK; ALAALITPK; SLQYLALAALITPKK; LALA | |
| | ALITP; SLQYLALAALITPKK; YLALAALIT; SLVKHHMYVSGKARG; VK | |
| | HHMYVSG; SPRCEYQAGHNKVGS; YQAGHNKVG; SSEVHIPLGDA | |
| | RLVI; IPLGDARLV; TGERDWHLGQGVSIE; WHLGQGVSI; TPKKIKPP | |
| | LPSVTKL; IKPPLPSVT; TWKSLVKHHMYVSGK; VKHHMYVSG; TWK | |
| | SLVKHHMYVSGK; WKSLVKHHM; VDRMRIRTWKSLVKH; IRTWKSL | |
| | VK; VGSLQYLALAALITP; LQYLALAAL; VGSLQYLALAALITP; YLALA | |
| | ALIT; VHIPLGDARLVITTY; IPLGDARLV; VITTYWGLHTGERDW; VIT | |
| | TYWGLH; VITTYWGLHTGERDW; YWGLHTGER; VKHHMYVSGKAR | |
| | GWF; YVSGKARGW; VMIVWQVDRMRIRTW; IVWQVDRMR; VMIVW | |
| | QVDRMRIRTW; MIVWQVDRM; VMIVWQVDRMRIRTW; WQVDRMRI | |
| | R; VSGKARGWFYRHHYE; ARGWFYRHH; VSIEWRKKRYSTQVD; IE | |
| | WRKKRYS; VSIEWRKKRYSTQVD; VSIEWRKKR; VSIEWRKKRYST | |
| | QVD; WRKKRYSTQ; VSPRCEYQAGHNKVG; EYQAGHNKV; VWQVD | |
| | RMRIRTWKSL; RMRIRTWKS; VWQVDRMRIRTWKSL; VDRMRIRT | |
| | W; WFYRHHYESPHPRIS; YRHHYESPH; WHLGQGVSIEWRKKR; G | |
| | QGVSIEWR; WHLGQGVSIEWRKKR; LGQGVSIEW; WKSLVKHHMY | |
| | VSGKA; VKHHMYVSG; WKSLVKHHMYVSGKA; WKSLVKHHM; WQV | |
| | DRMRIRTWKSLV; MRIRTWKSL; WQVDRMRIRTWKSLV; RMRIRTW | |
| | KS; WQVMIVWQVDRMRIR; MIVWQVDRM; WQVMIVWQVDRMRIR; | |
| | VMIVWQVDR; WQVMIVWQVDRMRIR; WQVMIVWQV; YLALAALITP | |
| | KKIKP; LAALITPKK; YLALAALITPKKIKP; YLALAALIT; YQAGHNKVG | |
| | SLQYLA; YQAGHNKVG; YRHHYESPHPRISSE; YESPHPRIS; YVSG | |
| | KARGWFYRHHY; ARGWFYRHH; YVSGKARGWFYRHHY; YVSGKA | |
| | RGW | |
| NP_057852 | 8-mers: | 5539-5757 |
| Vpr | EPHNEWTL; HNEWTLEL; NEWTLELL; TLELLEEL; EELKNEAV; ELKN | |
| | EAVR; EAVRHFPR; AVRHFPRI; GQHIYETY; ETYGDTWA; YGDTWA | |
| | GV; DTWAGVEA; TWAGVEAI; VEAIIRIL; RILQQLLF; ILQQLLFI; QQLL | |
| | FIHF; QLLFIHFR; LLFIHFRI; RIGCRHSR; HSRIGVTR; RIGVTRQR; VT | |
| | RQRRAR; RARNGASR | |
| | 9-mers: | |
| | REPHNEWTL; PHNEWTLEL; WTLELLEEL; TLELLEELK; LLEELKNE | |
| | A; NEAVRHFPR; EAVRHFPRI; FPRIWLHGL; WLHGLGQHI; GLGQHI | |
| | YET; IYETYGDTW; YETYGDTWA; ETYGDTWAG; TYGDTWAGV; DT | |
| | WAGVEAI; TWAGVEAII; AIIRILQQL; IRILQQLLF; RILQQLLFI; LQQLL | |
| | FIHF; QQLLFIHFR; QLLFIHFRI; FIHFRIGCR; FRIGCRHSR; RIGCRHS | |
| | RI; RHSRIGVTR; SRIGVTRQR; RIGVTRQRR; GVTRQRRAR; RQRRA | |
| | RNGA; RRARNGASR | |
| | 10-mers: | |
| | QAPEDQGPQR; EPHNEWTLEL; WTLELLEELK; ELLEELKNEA; LLEE | |
| | LKNEAV; ELKNEAVRHF; KNEAVRHFPR; EAVRHFPRIW; AVRHFPRI | |
| | WL; HFPRIWLHGL; FPRIWLHGLG; IWLHGLGQHI; WLHGLGQHIY; G | |
| | LGQHIYETY; HIYETYGDTW; ETYGDTWAGV; DTWAGVEAII; TWAG | |
| | VEAIIR; EAIIRILQQL; AIIRILQQLL; ILQQLLFIHF; LQQLLFIHFR; QQLL | |
| | FIHFRI; LLFIHFRIGC; LFIHFRIGCR; HFRIGCRHSR; FRIGCRHSRI; C | |
| | RHSRIGVTR; HSRIGVTRQR; SRIGVTRQRR; QRRARNGASR | |
| | 11-mers: | |
| | EQAPEDQGPQR; REPHNEWTLEL; EPHNEWTLELL; NEWTLELLEE | |
| | L; ELLEELKNEAV; EELKNEAVRHF; EAVRHFPRIWL; RHFPRIWLHG | |
| | L; RIWLHGLGQHI; IWLHGLGQHIY; WLHGLGQHIYE; HIYETYGDTW | |
| | A; YETYGDTWAGV; ETYGDTWAGVE; DTWAGVEAIIR; TWAGVEAII | |
| | RI; VEAIIRILQQL; EAIIRILQQLL; AIIRILQQLLF; IIRILQQLLFI; RILQQL | |
| | LFIHF; ILQQLLFIHFR; LQQLLFIHFRI; QLLFIHFRIGC; LLFIHFRIGCR; | |
| | IHFRIGCRHSR; RIGCRHSRIGV; GCRHSRIGVTR; HSRIGVTRQRR; | |
| | RIGVTRQRRAR; RQRRARNGASR | |
| | 15-mer + 9-mer core: | |
| | AGVEAIIRILQQLLF; VEAIIRILQ; AIIRILQQLLFIHFR; ILQQLLFIH; AIIR | |
| | ILQQLLFIHFR; IRILQQLLF; AIIRILQQLLFIHFR; LQQLLFIHF; DTWAG | |
| | VEAIIRILQQ; WAGVEAIIR; EAIIRILQQLLFIHF; IIRILQQLL; EAIIRILQ | |
| | QLLFIHF; ILQQLLFIH; EAIIRILQQLLFIHF; IRILQQLLF; EAVRHFPRI | |
| | WLHGLG; VRHFPRIWL; EELKNEAVRHFPRIW; LKNEAVRHF; ELKN | |
| | EAVRHFPRIWL; LKNEAVRHF; ELKNEAVRHFPRIWL; NEAVRHFPR; | |
| | ELLEELKNEAVRHFP; LKNEAVRHF; ETYGDTWAGVEAIIR; DTWAG | |
| | VEAI; FIHFRIGCRHSRIGV; FIHFRIGCR; FPRIWLHGLGQHIYE; IWLH | |
| | GLGQH; FPRIWLHGLGQHIYE; WLHGLGQHI; GDTWAGVEAIIRILQ; | |
| | WAGVEAIIR; GVEAIIRILQQLLFI; IRILQQLLF; HFPRIWLHGLGQHIY; I | |
| | WLHGLGQH; HFPRIWLHGLGQHIY; WLHGLGQHI; IIRILQQLLFIHFR | |
| | I; ILQQLLFIH; IIRILQQLLFIHFRI; IRILQQLLF; IIRILQQLLFIHFRI; LQQ | |
| | LLFIHF; ILQQLLFIHFRIGCR; ILQQLLFIH; ILQQLLFIHFRIGCR; LLFIH | |
| | FRIG; IRILQQLLFIHFRIG; ILQQLLFIH; IRILQQLLFIHFRIG; IRILQQLL | |
| | F; KNEAVRHFPRIWLHG; VRHFPRIWL; LEELKNEAVRHFPRI; LKNE | |
| | AVRHF; LELLEELKNEAVRHF; ELKNEAVRH; LELLEELKNEAVRHF; | |
| | LEELKNEAV; LFIHFRIGCRHSRIG; FIHFRIGCR; LKNEAVRHFPRIW | |
| | LH; LKNEAVRHF; LKNEAVRHFPRIWLH; VRHFPRIWL; LLEELKNEA | |
| | VRHFPR; LKNEAVRHF; LLFIHFRIGCRHSRI; FIHFRIGCR; LQQLLFI | |
| | HFRIGCRH; FIHFRIGCR; NEAVRHFPRIWLHGL; VRHFPRIWL; PRIW | |
| | LHGLGQHIYET; WLHGLGQHI; QLLFIHFRIGCRHSR; FIHFRIGCR; Q | |
| | QLLFIHFRIGCRHS; FIHFRIGCR; RHFPRIWLHGLGQHI; FPRIWLHG | |
| | L; RHFPRIWLHGLGQHI; IWLHGLGQH; RILQQLLFIHFRIGC; ILQQLL | |
| | FIH; RIWLHGLGQHIYETY; WLHGLGQHI; TYGDTWAGVEAIIRI; WAG | |
| | VEAIIR; VEAIIRILQQLLFIH; IRILQQLLF; VRHFPRIWLHGLGQH; FPRI | |
| | WLHGL; WAGVEAIIRILQQLL; WAGVEAIIR; YGDTWAGVEAIIRIL; WA | |
| | GVEAIIR | |
| NP_057853 Tat | 8-mers: | 5758-6044 |
| | MQPIPIVA; QPIPIVAI; PIPIVAIV; IPIVAIVA; PIVAIVAL; IVAIVALV; VAIV | |
| | ALVV; AIVALVVA; IVALVVAI; ALVVAIII; LVVAIIIA; VVAIIIAI; VAIIIAIV; AI | |
| | IIAIVV; IIIAIVVW; IAIVVWSI; AIVVWSIV; IVVWSIVI; VVWSIVII; WSIVII | |
| | EY; SIVIIEYR; IVIIEYRK; VIIEYRKI; IEYRKILR; RKILRQRK; SEGEISAL; | |
| | EISALVEM; SALVEMGV; LVEMGVEM; APWDVDDL | |
| | 9-mers: | |
| | MQPIPIVAI; QPIPIVAIV; IPIVAIVAL; PIVAIVALV; IVAIVALVV; AIVALV | |
| | VAI; IVALVVAII; VALVVAIII; ALVVAIIIA; LVVAIIIAI; VVAIIIAIV; VAIIIAIV | |
| | V; AIIIAIVVW; IIAIVVWSI; IAIVVWSIV; AIVVWSIVI; IVVWSIVII; VWSIVI | |
| | IEY; WSIVIIEYR; SIVIIEYRK; VIIEYRKIL; IIEYRKILR; EYRKILRQR; YR | |
| | KILRQRK; ILRQRKIDR; KIDRLIDRL; RLIDRLIER; LIDRLIERA; ESEGE | |
| | ISAL; SEGEISALV; GEISALVEM; ISALVEMGV; ALVEMGVEM; VEMG | |
| | HHAPW | |
| | 10-mers: | |
| | MQPIPIVAIV; QPIPIVAIVA; IPIVAIVALV; PIVAIVALVV; VAIVALVVAI; A | |
| | IVALVVAII; IVALVVAIII; ALVVAIIIAI; LVVAIIIAIV; VVAIIIAIVV; VAIIIAIV | |
| | VW; IIIAIVVWSI; IIAIVVWSIV; IAIVVWSIVI; AIVVWSIVII; VVWSIVIIEY; | |
| | VWSIVIIEYR; WSIVIIEYRK; VIIEYRKILR; IEYRKILRQR; EYRKILRQR | |
| | K; KILRQRKIDR; ILRQRKIDRL; KIDRLIDRLI; RLIDRLIERA; NESEGEI | |
| | SAL; ESEGEISALV; EISALVEMGV; SALVEMGVEM; EMGHHAPWDV; | |
| | HHAPWDVDDL | |
| | 11-mers: | |
| | MQPIPIVAIVA; QPIPIVAIVAL; PIPIVAIVALV; IPIVAIVALVV; IVAIVALV | |
| | VAI; VAIVALVVAII; AIVALVVAIII; IVALVVAIIIA; ALVVAIIIAIV; LVVAIIIAI | |
| | VV; VVAIIIAIVVW; AIIIAIVVWSI; IIIAIVVWSIV; IIAIVVWSIVI; IAIVVWSI | |
| | VII; IVVWSIVIIEY; VVWSIVIIEYR; VWSIVIIEYRK; WSIVIIEYRKI; SIVII | |
| | EYRKIL; IVIIEYRKILR; IIEYRKILRQR; EYRKILRQRKI; KILRQRKIDRL; | |
| | ILRQRKIDRLI; RQRKIDRLIDR; NESEGEISALV; SEGEISALVEM; GEI | |
| | SALVEMGV; ISALVEMGVEM; MGVEMGHHAPW; VEMGHHAPWDV | |
| | 15-mer + 9-mer core: | |
| | AIIIAIVVWSIVIIE; IIAIVVWSI; AIIIAIVVWSIVIIE; IVVWSIVII; AIVALVV | |
| | AIIIAIVV; IVALVVAII; AIVALVVAIIIAIVV; LVVAIIIAI; AIVVWSIVIIEYRKI; | |
| | IVVWSIVII; AIVVWSIVIIEYRKI; VVWSIVIIE; AIVVWSIVIIEYRKI; WSI | |
| | VIIEYR; ALVEMGVEMGHHAPW; LVEMGVEMG; ALVVAIIIAIVVWSI; I | |
| | IIAIVVWS; ALVVAIIIAIVVWSI; VAIIIAIVV; ALVVAIIIAIVVWSI; VVAIIIAI | |
| | V; EGEISALVEMGVEMG; ISALVEMGV; EISALVEMGVEMGHH; LVE | |
| | MGVEMG; EMGVEMGHHAPWDVD; MGHHAPWDV; EYRKILRQRKI | |
| | DRLI; ILRQRKIDR; EYRKILRQRKIDRLI; LRQRKIDRL; EYRKILRQRKI | |
| | DRLI; YRKILRQRK; GEISALVEMGVEMGH; LVEMGVEMG; GVEMGH | |
| | HAPWDVDDL; MGHHAPWDV; IAIVVWSIVIIEYRK; IVVWSIVII; IEYRK | |
| | ILRQRKIDRL; ILRQRKIDR; IEYRKILRQRKIDRL; YRKILRQRK; IIAIVV | |
| | WSIVIIEYR; IIAIVVWSI; IIAIVVWSIVIIEYR; IVVWSIVII; IIEYRKILRQR | |
| | KIDR; EYRKILRQR; IIEYRKILRQRKIDR; YRKILRQRK; IIIAIVVWSIVII | |
| | EY; IIAIVVWSI; IIIAIVVWSIVIIEY; IVVWSIVII; ILRQRKIDRLIDRLI; ILR | |
| | QRKIDR; IPIVAIVALVVAIII; IVAIVALVV; IPIVAIVALVVAIII; VAIVALVV | |
| | A; ISALVEMGVEMGHHA; LVEMGVEMG; IVAIVALVVAIIIAI; IVAIVALV | |
| | V; IVAIVALVVAIIIAI; IVALVVAII; IVAIVALVVAIIIAI; VAIVALVVA; IVALV | |
| | VAIIIAIVVW; LVVAIIIAI; IVALVVAIIIAIVVW; VAIIIAIVV; IVIIEYRKILRQ | |
| | RKI; IIEYRKILR; IVIIEYRKILRQRKI; YRKILRQRK; IVVWSIVIIEYRKIL; | |
| | IVVWSIVII; KILRQRKIDRLIDRL; ILRQRKIDR; KILRQRKIDRLIDRL; L | |
| | RQRKIDRL; LVVAIIIAIVVWSIV; IIAIVVWSI; LVVAIIIAIVVWSIV; IIIAIV | |
| | VWS; LVVAIIIAIVVWSIV; VAIIIAIVV; MGVEMGHHAPWDVDD; MGHH | |
| | APWDV; MQPIPIVAIVALVVA; IPIVAIVAL; MQPIPIVAIVALVVA; IVAIV | |
| | ALVV; PIPIVAIVALVVAII; IVAIVALVV; PIPIVAIVALVVAII; VAIVALVVA; | |
| | PIVAIVALVVAIIIA; IVAIVALVV; PIVAIVALVVAIIIA; VAIVALVVA; QPIP | |
| | IVAIVALVVAI; IVAIVALVV; QPIPIVAIVALVVAI; VAIVALVVA; RKILRQ | |
| | RKIDRLIDR; ILRQRKIDR; RKILRQRKIDRLIDR; LRQRKIDRL; SALVE | |
| | MGVEMGHHAP; LVEMGVEMG; SIVIIEYRKILRQRK; IEYRKILRQ; SI | |
| | VIIEYRKILRQRK; IIEYRKILR; SIVIIEYRKILRQRK; VIIEYRKIL; VAIIIAI | |
| | VVWSIVII; AIVVWSIVI; VAIIIAIVVWSIVII; IAIVVWSIV; VAIIIAIVVWSIV | |
| | II; IIAIVVWSI; VAIIIAIVVWSIVII; IIIAIVVWS; VAIVALVVAIIIAIV; IVALVV | |
| | AII; VAIVALVVAIIIAIV; LVVAIIIAI; VALVVAIIIAIVVWS; LVVAIIIAI; VALV | |
| | VAIIIAIVVWS; VAIIIAIVV; VALVVAIIIAIVVWS; VVAIIIAIV; VEMGVEM | |
| | GHHAPWDV; MGVEMGHHA; VIIEYRKILRQRKID; EYRKILRQR; VIIE | |
| | YRKILRQRKID; YRKILRQRK; VVAIIIAIVVWSIVI; IIAIVVWSI; VVAIIIAI | |
| | VVWSIVI; IIIAIVVWS; VVWSIVIIEYRKILR; WSIVIIEYR; VWSIVIIEYRK | |
| | ILRQ; IIEYRKILR; WSIVIIEYRKILRQR; IIEYRKILR; YRKILRQRKIDRLI | |
| | D; ILRQRKIDR; YRKILRQRKIDRLID; LRQRKIDRL; YRKILRQRKIDRLI | |
| | D; YRKILRQRK | |
| NP_057854 | 8-mers: | 6045-6355 |
| Rev | ELIRTVRL; LIRTVRLI; RTVRLIKL; RLIKLLYQ; RQARRNRR; QARRNR | |
| | RR; RRNRRRRW; RNRRRRWR; RRRRWRER; RRWRERQR; RQRQI | |
| | HSI; RQIHSISE; QIHSISER; SERILGTY; ILGTYLGR; RSAEPVPL; AEP | |
| | VPLQL; VPLQLPPL; LQLPPLER; QLPPLERL; LPPLERLT; PPLERLTL; | |
| | GTSGTQGV; VGSPQILV; ILVESPTV; TVLESGTK | |
| | 9-mers: | |
| | EELIRTVRL; ELIRTVRLI; LIRTVRLIK; TVRLIKLLY; RLIKLLYQS; GTR | |
| | QARRNR; RQARRNRRR; QARRNRRRR; RRNRRRRWR; NRRRRW | |
| | RER; RRRRWRERQ; RRRWRERQR; RRWRERQRQ; RQIHSISER; QI | |
| | HSISERI; IHSISERIL; SISERILGT; ISERILGTY; SERILGTYL; RILGTYL | |
| | GR; ILGTYLGRS; YLGRSAEPV; SAEPVPLQL; PVPLQLPPL; LQLPPL | |
| | ERL; QLPPLERLT; LPPLERLTL; CGTSGTQGV; TQGVGSPQI; GVGS | |
| | PQILV; QILVESPTV; ILVESPTVL | |
| | 10-mers: | |
| | DSDEELIRTV; DEELIRTVRL; ELIRTVRLIK; LIRTVRLIKL; RTVRLIKLL | |
| | Y; GTRQARRNRR; TRQARRNRRR; RQARRNRRRR; ARRNRRRRW | |
| | R; RNRRRRWRER; RRRRWRERQR; RRWRERQRQI; RERQRQIHSI; | |
| | RQIHSISERI; SISERILGTY; ERILGTYLGR; ILGTYLGRSA; TYLGRSA | |
| | EPV; RSAEPVPLQL; EPVPLQLPPL; PLQLPPLERL; LQLPPLERLT; Q | |
| | LPPLERLTL; TLDCNEDCGT; QGVGSPQILV; PQILVESPTV | |
| | 11-mers: | |
| | DSDEELIRTVR; ELIRTVRLIKL; LIRTVRLIKLL; GTRQARRNRRR; QA | |
| | RRNRRRRWR; RRNRRRRWRER; RRRRWRERQRQ; RRRWRERQ | |
| | RQI; RRWRERQRQIH; RQRQIHSISER; RQIHSISERIL; HSISERILGT | |
| | Y; SISERILGTYL; RILGTYLGRSA; GTYLGRSAEPV; YLGRSAEPVPL; | |
| | AEPVPLQLPPL; VPLQLPPLERL; LQLPPLERLTL; TQGVGSPQILV; E | |
| | SPTVLESGTK | |
| | 15-mer + 9-mer core: | |
| | AEPVPLQLPPLERLT; LQLPPLERL; AEPVPLQLPPLERLT; VPLQLP | |
| | PLE; ARRNRRRRWRERQRQ; NRRRRWRER; DEELIRTVRLIKLLY; I | |
| | RTVRLIKL; DSDEELIRTVRLIKL; EELIRTVRL; DSDEELIRTVRLIKL; LI | |
| | RTVRLIK; EELIRTVRLIKLLYQ; IRTVRLIKL; EELIRTVRLIKLLYQ; LIR | |
| | TVRLIK; EELIRTVRLIKLLYQ; TVRLIKLLY; EGTRQARRNRRRRWR; | |
| | RQARRNRRR; EGTRQARRNRRRRWR; TRQARRNRR; ELIRTVRLIK | |
| | LLYQS; IRTVRLIKL; ELIRTVRLIKLLYQS; TVRLIKLLY; ELIRTVRLIKL | |
| | LYQS; VRLIKLLYQ; EPVPLQLPPLERLTL; LQLPPLERL; EPVPLQLPP | |
| | LERLTL; VPLQLPPLE; ERILGTYLGRSAEPV; ILGTYLGRS; ERILGTY | |
| | LGRSAEPV; LGTYLGRSA; GRSAEPVPLQLPPLE; GRSAEPVPL; GR | |
| | SAEPVPLQLPPLE; PVPLQLPPL; GSPQILVESPTVLES; ILVESPTVL; | |
| | GSPQILVESPTVLES; LVESPTVLE; GTRQARRNRRRRWRE; RQAR | |
| | RNRRR; GTYLGRSAEPVPLQL; YLGRSAEPV; GVGSPQILVESPTVL; | |
| | PQILVESPT; HSISERILGTYLGRS; ERILGTYLG; IKLLYQSNPPPNP | |
| | EG; LLYQSNPPP; IKLLYQSNPPPNPEG; LYQSNPPPN; IKLLYQSNP | |
| | PPNPEG; YQSNPPPNP; ILGTYLGRSAEPVPL; ILGTYLGRS; ILGTYL | |
| | GRSAEPVPL; YLGRSAEPV; ILVESPTVLESGTKE; ILVESPTVL; ILVE | |
| | SPTVLESGTKE; LVESPTVLE; IRTVRLIKLLYQSNP; IRTVRLIKL; IRT | |
| | VRLIKLLYQSNP; TVRLIKLLY; IRTVRLIKLLYQSNP; VRLIKLLYQ; ISE | |
| | RILGTYLGRSAE; ERILGTYLG; ISERILGTYLGRSAE; ILGTYLGRS; IS | |
| | ERILGTYLGRSAE; LGTYLGRSA; KLLYQSNPPPNPEGT; LYQSNPP | |
| | PN; KLLYQSNPPPNPEGT; YQSNPPPNP; LGTYLGRSAEPVPLQ; YL | |
| | GRSAEPV; LIKLLYQSNPPPNPE; LLYQSNPPP; LIKLLYQSNPPPNP | |
| | E; LYQSNPPPN; LIKLLYQSNPPPNPE; YQSNPPPNP; LIRTVRLIKLL | |
| | YQSN; IRTVRLIKL; LIRTVRLIKLLYQSN; TVRLIKLLY; LIRTVRLIKLLY | |
| | QSN; VRLIKLLYQ; LLYQSNPPPNPEGTR; YQSNPPPNP; LPPLERLT | |
| | LDCNEDC; LERLTLDCN; LQLPPLERLTLDCNE; LERLTLDCN; LQLP | |
| | PLERLTLDCNE; LQLPPLERL; LYQSNPPPNPEGTRQ; YQSNPPPNP; | |
| | NPEGTRQARRNRRRR; TRQARRNRR; NRRRRWRERQRQIHS; RR | |
| | RWRERQR; NRRRRWRERQRQIHS; WRERQRQIH; PEGTRQARRN | |
| | RRRRW; TRQARRNRR; PLQLPPLERLTLDCN; LQLPPLERL; PNPEG | |
| | TRQARRNRRR; TRQARRNRR; PPLERLTLDCNEDCG; LERLTLDCN; | |
| | PPNPEGTRQARRNRR; EGTRQARRN; PQILVESPTVLESGT; ILVES | |
| | PTVL; PQILVESPTVLESGT; LVESPTVLE; PVPLQLPPLERLTLD; LQL | |
| | PPLERL; PVPLQLPPLERLTLD; VPLQLPPLE; QARRNRRRRWRERQ | |
| | R; NRRRRWRER; QILVESPTVLESGTK; LVESPTVLE; QLPPLERLTL | |
| | DCNED; LERLTLDCN; RILGTYLGRSAEPVP; ILGTYLGRS; RILGTYL | |
| | GRSAEPVP; YLGRSAEPV; RLIKLLYQSNPPPNP; LIKLLYQSN; RLIK | |
| | LLYQSNPPPNP; LLYQSNPPP; RLIKLLYQSNPPPNP; LYQSNPPPN; | |
| | RNRRRRWRERQRQIH; RRRWRERQR; RQARRNRRRRWRERQ; N | |
| | RRRRWRER; RQARRNRRRRWRERQ; RRNRRRRWR; RRNRRRR | |
| | WRERQRQI; NRRRRWRER; RRRRWRERQRQIHSI; WRERQRQIH; | |
| | RRRWRERQRQIHSIS; WRERQRQIH; RRWRERQRQIHSISE; WRER | |
| | QRQIH; RSAEPVPLQLPPLER; VPLQLPPLE; RTVRLIKLLYQSNPP; I | |
| | KLLYQSNP; RTVRLIKLLYQSNPP; VRLIKLLYQ; SAEPVPLQLPPLER | |
| | L; PVPLQLPPL; SAEPVPLQLPPLERL; VPLQLPPLE; SDEELIRTVRLI | |
| | KLL; IRTVRLIKL; SERILGTYLGRSAEP; ILGTYLGRS; SERILGTYLGR | |
| | SAEP; LGTYLGRSA; SISERILGTYLGRSA; ERILGTYLG; SISERILGT | |
| | YLGRSA; ILGTYLGRS; SPQILVESPTVLESG; ILVESPTVL; SPQILVE | |
| | SPTVLESG; LVESPTVLE; TRQARRNRRRRWRER; RRNRRRRWR; T | |
| | VRLIKLLYQSNPPP; IKLLYQSNP; TVRLIKLLYQSNPPP; VRLIKLLYQ; | |
| | TYLGRSAEPVPLQLP; YLGRSAEPV; VGSPQILVESPTVLE; ILVESP | |
| | TVL; VGSPQILVESPTVLE; VGSPQILVE; VPLQLPPLERLTLDC; LQL | |
| | PPLERL; VPLQLPPLERLTLDC; VPLQLPPLE; VRLIKLLYQSNPPPN; | |
| | LLYQSNPPP; YLGRSAEPVPLQLPP; YLGRSAEPV; YQSNPPPNPE | |
| | GTRQA; YQSNPPPNP | |
| NP_057855 | 8-mer | 6356-6574 |
| Vpu | EPHNEWTL; HNEWTLEL; NEWTLELL; TLELLEEL; EELKNEAV; ELKN | |
| | EAVR; EAVRHFPR; AVRHFPRI; GQHIYETY; ETYGDTWA; YGDTWA | |
| | GV; DTWAGVEA; TWAGVEAI; VEAIIRIL; RILQQLLF; ILQQLLFI; QQLL | |
| | FIHF; QLLFIHFR; LLFIHFRI; RIGCRHSR; HSRIGVTR; RIGVTRQR; VT | |
| | RQRRAR; RARNGASR | |
| | 9-mer | |
| | REPHNEWTL; PHNEWTLEL; WTLELLEEL; TLELLEELK; LLEELKNE | |
| | A; NEAVRHFPR; EAVRHFPRI; FPRIWLHGL; WLHGLGQHI; GLGQHI | |
| | YET; IYETYGDTW; YETYGDTWA; ETYGDTWAG; TYGDTWAGV; DT | |
| | WAGVEAI; TWAGVEAII; AIIRILQQL; IRILQQLLF; RILQQLLFI; LQQLL | |
| | FIHF; QQLLFIHFR; QLLFIHFRI; FIHFRIGCR; FRIGCRHSR; RIGCRHS | |
| | RI; RHSRIGVTR; SRIGVTRQR; RIGVTRQRR; GVTRQRRAR; RQRRA | |
| | RNGA; RRARNGASR | |
| | 10-mer | |
| | QAPEDQGPQR; EPHNEWTLEL; WTLELLEELK; ELLEELKNEA; LLEE | |
| | LKNEAV; ELKNEAVRHF; KNEAVRHFPR; EAVRHFPRIW; AVRHFPRI | |
| | WL; HFPRIWLHGL; FPRIWLHGLG; IWLHGLGQHI; WLHGLGQHIY; G | |
| | LGQHIYETY; HIYETYGDTW; ETYGDTWAGV; DTWAGVEAII; TWAG | |
| | VEAIIR; EAIIRILQQL; AIIRILQQLL; ILQQLLFIHF; LQQLLFIHFR; QQLL | |
| | FIHFRI; LLFIHFRIGC; LFIHFRIGCR; HFRIGCRHSR; FRIGCRHSRI; C | |
| | RHSRIGVTR; HSRIGVTRQR; SRIGVTRQRR; QRRARNGASR | |
| | 11-mer | |
| | EQAPEDQGPQR; REPHNEWTLEL; EPHNEWTLELL; NEWTLELLEE | |
| | L; ELLEELKNEAV; EELKNEAVRHF; EAVRHFPRIWL; RHFPRIWLHG | |
| | L; RIWLHGLGQHI; IWLHGLGQHIY; WLHGLGQHIYE; HIYETYGDTW | |
| | A; YETYGDTWAGV; ETYGDTWAGVE; DTWAGVEAIIR; TWAGVEAII | |
| | RI; VEAIIRILQQL; EAIIRILQQLL; AIIRILQQLLF; IIRILQQLLFI; RILQQL | |
| | LFIHF; ILQQLLFIHFR; LQQLLFIHFRI; QLLFIHFRIGC; LLFIHFRIGCR; | |
| | IHFRIGCRHSR; RIGCRHSRIGV; GCRHSRIGVTR; HSRIGVTRQRR; | |
| | RIGVTRQRRAR; RQRRARNGASR | |
| | 15-mer + 9-mer core | |
| | AGVEAIIRILQQLLF; VEAIIRILQ; AIIRILQQLLFIHFR; ILQQLLFIH; AIIR | |
| | ILQQLLFIHFR; IRILQQLLF; AIIRILQQLLFIHFR; LQQLLFIHF; DTWAG | |
| | VEAIIRILQQ; WAGVEAIIR; EAIIRILQQLLFIHF; IIRILQQLL; EAIIRILQ | |
| | QLLFIHF; ILQQLLFIH; EAIIRILQQLLFIHF; IRILQQLLF; EAVRHFPRI | |
| | WLHGLG; VRHFPRIWL; EELKNEAVRHFPRIW; LKNEAVRHF; ELKN | |
| | EAVRHFPRIWL; LKNEAVRHF; ELKNEAVRHFPRIWL; NEAVRHFPR; | |
| | ELLEELKNEAVRHFP; LKNEAVRHF; ETYGDTWAGVEAIIR; DTWAG | |
| | VEAI; FIHFRIGCRHSRIGV; FIHFRIGCR; FPRIWLHGLGQHIYE; IWLH | |
| | GLGQH; FPRIWLHGLGQHIYE; WLHGLGQHI; GDTWAGVEAIIRILQ; | |
| | WAGVEAIIR; GVEAIIRILQQLLFI; IRILQQLLF; HFPRIWLHGLGQHIY; I | |
| | WLHGLGQH; HFPRIWLHGLGQHIY; WLHGLGQHI; IIRILQQLLFIHFR | |
| | I; ILQQLLFIH; IIRILQQLLFIHFRI; IRILQQLLF; IIRILQQLLFIHFRI; LQQ | |
| | LLFIHF; ILQQLLFIHFRIGCR; ILQQLLFIH; ILQQLLFIHFRIGCR; LLFIH | |
| | FRIG; IRILQQLLFIHFRIG; ILQQLLFIH; IRILQQLLFIHFRIG; IRILQQLL | |
| | F; KNEAVRHFPRIWLHG; VRHFPRIWL; LEELKNEAVRHFPRI; LKNE | |
| | AVRHF; LELLEELKNEAVRHF; ELKNEAVRH; LELLEELKNEAVRHF; | |
| | LEELKNEAV; LFIHFRIGCRHSRIG; FIHFRIGCR; LKNEAVRHFPRIW | |
| | LH; LKNEAVRHF; LKNEAVRHFPRIWLH; VRHFPRIWL; LLEELKNEA | |
| | VRHFPR; LKNEAVRHF; LLFIHFRIGCRHSRI; FIHFRIGCR; LQQLLFI | |
| | HFRIGCRH; FIHFRIGCR; NEAVRHFPRIWLHGL; VRHFPRIWL; PRIW | |
| | LHGLGQHIYET; WLHGLGQHI; QLLFIHFRIGCRHSR; FIHFRIGCR; Q | |
| | QLLFIHFRIGCRHS; FIHFRIGCR; RHFPRIWLHGLGQHI; FPRIWLHG | |
| | L; RHFPRIWLHGLGQHI; IWLHGLGQH; RILQQLLFIHFRIGC; ILQQLL | |
| | FIH; RIWLHGLGQHIYETY; WLHGLGQHI; TYGDTWAGVEAIIRI; WAG | |
| | VEAIIR; VEAIIRILQQLLFIH; IRILQQLLF; VRHFPRIWLHGLGQH; FPRI | |
| | WLHGL; WAGVEAIIRILQQLL; WAGVEAIIR; YGDTWAGVEAIIRIL; WA | |
| | GVEAIIR | |
| NP_057856 | 8-mer | 6575-9108 |
| Envelope | RVKEKYQH; KEKYQHLW; EKYQHLWR; KYQHLWRW; HLWRWGWR; | |
| surface | WGWRWGTM; WRWGTMLL; TMLLGMLM; MLLGMLMI; LLGMLMIC; | |
| glycoprotein | GMLMICSA; MLMICSAT; MICSATEK; CSATEKLW; SATEKLWV; EKL | |
| gp160 | WVTVY; KLWVTVYY; WVTVYYGV; TVYYGVPV; VYYGVPVVV; YYGV | |
| precursor | PVWK; VPVWKEAT; KEATTTLF; TTTLFCAS; TLFCASDA; CASDAKA | |
| | Y; YDTEVHNV; DTEVHNVW; EVHNVWAT; NVWATHAC; VWATHACV; | |
| | NPQEVVLV; QEVVLVNV; EVVLVNVT; NVTENFNM; VTENFNMW; TE | |
| | NFNMWK; NMWKNDMV; MHEDIISL; SLWDQSLK; QSLKPCVK; SLKP | |
| | CVKL; KLTPLCVS; LTPLCVSL; TPLCVSLK; SLKCTDLK; NTNSSSGR; | |
| | SGRMIMEK; MIMEKGEI; GEIKNCSF; FNISTSIR; ISTSIRGK; STSIRG | |
| | KV; SIRGKVQK; KVQKEYAF; VQKEYAFF; KEYAFFYK; EYAFFYKL; F | |
| | FYKLDII; YKLDIIPI; IPIDNDTT; LTSCNTSV; NTSVITQA; VITQACPK; IT | |
| | QACPKV; FEPIPIHY; IPIHYCAP; HYCAPAGF; YCAPAGFA; CAPAGF | |
| | AI; APAGFAIL; AILKCNNK; GTGPCTNV; TVQCTHGI; VQCTHGIR; CT | |
| | HGIRPV; GIRPVVST; RPVVSTQL; VVSTQLLL; QLLLNGSL; LLLNGSL | |
| | A; SLAEEEVV; EEVVIRSV; VVIRSVNF; SVNFTDNA; FTDNAKTI; IVQL | |
| | NTSV; QLNTSVEI; SVEINCTR; RKRIRIQR; RIQRGPGR; RGPGRAFV; | |
| | RAFVTIGK; QAHCNISR; RAKWNNTL; TLKQIASK; KQIASKLR; NNKTI | |
| | IFK; PEIVTHSF; SFNCGGEF; GEFFYCNS; FYCNSTQL; QLFNSTWF; | |
| | STWFNSTW; EGSDTITL; DTITLPCR; TITLPCRI; ITLPCRIK; LPCRIKQ | |
| | I; RIKQIINM; KQIINMWQ; QIINMWQK; IINMWQKV; WQKVGKAM; KVG | |
| | KAMYA; KAMYAPPI; APPISGQI; QIRCSSNI; CSSNITGL; ITGLLLTR; N | |
| | NESEIFR; WRSELYKY; RSELYKYK; ELYKYKVV; LYKYKVVK; KVVKI | |
| | EPL; EPLGVAPT; GVAPTKAK; RRVVQREK; RVVQREKR; REKRAVGI; | |
| | RAVGIGAL; FLGFLGAA; FLGAAGST; STMGAASM; MGAASMTL; AA | |
| | SMTLTV; SMTLTVQA; MTLTVQAR; TVQARQLL; RQLLSGIV; QLLSGI | |
| | VQ; LLSGIVQQ; VQQQNNLL; QQQNNLLR; QQNNLLRA; NLLRAIEA; L | |
| | LRAIEAQ; AIEAQQHL; IEAQQHLL; AQQHLLQL; HLLQLTVW; LQLTV | |
| | WGI; QLTVWGIK; TVWGIKQL; GIKQLQAR; KQLQARIL; QLQARILA; L | |
| | QARILAV; ILAVERYL; LAVERYLK; RYLKDQQL; YLKDQQLL; QLLGIW | |
| | GC; GIWGCSGK; KLICTTAV; TTAVPWNA; AVPWNASW; VPWNASW | |
| | S; QIWNHTTVV; TTWMEWDR; WMEWDREI; WDREINNY; EINNYTSL; | |
| | YTSLIHSL; ESQNQQEK; QEKNEQEL; NEQELLEL; LLELDKWA; ELD | |
| | KWASL; KWASLWNW; WASLWNWF; SLWNWFNI; NWFNITNW; WFN | |
| | ITNWL; FNITNWLW; NITNWLWY; ITNWLWYI; NWLWYIKL; WLWYIKL | |
| | F; LWYIKLFI; WYIKLFIM; YIKLFIMI; FIMIVGGL; IMIVGGLV; IVGGLVG | |
| | L; GLVGLRIV; GLRIVFAV; IVFAVLSI; AVLSIVNR; VLSIVNRV; LSIVNR | |
| | VR; VRQGYSPL; SPLSFQTH; PLSFQTHL; FQTHLPTP; QTHLPTPR; L | |
| | PTPRGPD; RDRDRSIR; RLVNGSLA; LVNGSLAL; ALIWDDLR; RSLCL | |
| | FSY; LCLFSYHR; CLFSYHRL; LFSYHRLR; SYHRLRDL; RLRDLLLI; D | |
| | LLLIVTR; LLLIVTRI; LLIVTRIV; IVTRIVEL; RIVELLGR; IVELLGRR; GR | |
| | RGWEAL; RRGWEALK; WEALKYWW; ALKYWWNL; YWWNLLQY; NL | |
| | LQYWSQ; LQYWSQEL; QYWSQELK; SLLNATAI; LLNATAIA; NATAIA | |
| | VA; AVAEGTDR; AEGTDRVI; GTDRVIEV; EVVQGACR; RAIRHIPR; AI | |
| | RHIPRR; RHIPRRIR; IPRRIRQG; RIRQGLER | |
| | 9-mer | |
| | RVKEKYQHL; KEKYQHLWR; YQHLWRWGW; HLWRWGWRW; WR | |
| | WGWRWGT; WGWRWGTML; GWRWGTMLL; TMLLGMLMI; MLLGM | |
| | LMIC; LGMLMICSA; LMICSATEK; MICSATEKL; ICSATEKLW; ATEKL | |
| | WVTV; TEKLWVTVY; EKLWVTVYY; KLWVTVYYG; LWVTVYYGV; VT | |
| | VYYGVPV; TVYYGVPVW; VYYGVPVWK; VPVWKEATT; VWKEATTT | |
| | L; EATTTLFCA; TLFCASDAK; FCASDAKAY; AYDTEVHNV; TEVHNV | |
| | WAT; EVHNVWATH; NVWATHACV; PTDPNPQEV; DPNPQEVVL; VL | |
| | VNVTENF; VTENFNMWK; FNMWKNDMV; QMHEDIISL; IISLWDQSL; | |
| | ISLWDQSLK; SLWDQSLKP; SLKPCVKLT; KPCVKLTPL; KLTPLCVSL; | |
| | LTPLCVSLK; VSLKCTDLK; TNTNSSSGR; NTNSSSGRM; SSGRMIM | |
| | EK; RMIMEKGEI; MIMEKGEIK; EIKNCSFNI; CSFNISTSI; SFNISTSIR; | |
| | NISTSIRGK; ISTSIRGKV; TSIRGKVQK; KVQKEYAFF; VQKEYAFFY; | |
| | KEYAFFYKL; AFFYKLDII; FYKLDIIPI; IPIDNDTTS; PIDNDTTSY; KLTS | |
| | CNTSV; LTSCNTSVI; NTSVITQAC; SVITQACPK; VITQACPKV; TQAC | |
| | PKVSF; CPKVSFEPI; KVSFEPIPI; SFEPIPIHY; EPIPIHYCA; IPIHYCA | |
| | PA; YCAPAGFAI; CAPAGFAIL; APAGFAILK; FAILKCNNK; ILKCNNKT | |
| | F; NGTGPCTNV; STVQCTHGI; TVQCTHGIR; CTHGIRPVV; RPVVST | |
| | QLL; TQLLLNGSL; QLLLNGSLA; LLLNGSLAE; LLNGSLAEE; SLAEEE | |
| | VVI; EVVIRSVNF; SVNFTDNAK; NAKTIIVQL; IIVQLNTSV; VQLNTSV | |
| | EI; TSVEINCTR; CTRPNNNTR; RPNNNTRKR; IQRGPGRAF; QRGPG | |
| | RAFV; GPGRAFVTI; GRAFVTIGK; VTIGKIGNM; TIGKIGNMR; NMRQ | |
| | AHCNI; RQAHCNISR; QAHCNISRA; HCNISRAKW; SRAKWNNTL; RA | |
| | KWNNTLK; NTLKQIASK; TLKQIASKL; IASKLREQF; GNNKTIIFK; KQS | |
| | SGGDPE; DPEIVTHSF; HSFNCGGEF; SFNCGGEFF; FNCGGEFFY; | |
| | GEFFYCNST; FFYCNSTQL; FYCNSTQLF; STQLFNSTW; TQLFNST | |
| | WF; QLFNSTWFN; NSTWFNSTW; TEGSDTITL; DTITLPCRI; TITLPC | |
| | RIK; TLPCRIKQI; LPCRIKQII; KQIINMWQK; QIINMWQKV; NMWQKV | |
| | GKA; MWQKVGKAM; WQKVGKAMY; YAPPISGQI; GQIRCSSNI; RCS | |
| | SNITGL; CSSNITGLL; NITGLLLTR; NSNNESEIF; SNNESEIFR; MRDN | |
| | WRSEL; NWRSELYKY; WRSELYKYK; ELYKYKVVK; LYKYKVVKI; VV | |
| | KIEPLGV; EPLGVAPTK; GVAPTKAKR; APTKAKRRV; KAKRRVVQR; | |
| | KRRVVQREK; RRVVQREKR; VVQREKRAV; RAVGIGALF; AVGIGAL | |
| | FL; IGALFLGFL; ALFLGFLGA; FLGAAGSTM; GAAGSTMGA; STMGA | |
| | ASMT; TMGAASMTL; MGAASMTLT; GAASMTLTV; SMTLTVQAR; TL | |
| | TVQARQL; LTVQARQLL; QARQLLSGI; QLLSGIVQQ; LLSGIVQQQ; G | |
| | IVQQQNNL; VQQQNNLLR; QQQNNLLRA; QQNNLLRAI; NLLRAIEAQ; | |
| | RAIEAQQHL; AIEAQQHLL; EAQQHLLQL; AQQHLLQLT; QQHLLQLT | |
| | V; HLLQLTVWG; LLQLTVWGI; LQLTVWGIK; LTVWGIKQL; TVWGIKQ | |
| | LQ; GIKQLQARI; KQLQARILA; QLQARILAV; QARILAVER; RILAVERY | |
| | L; ILAVERYLK; RYLKDQQLL; YLKDQQLLG; QQLLGIWGC; GIWGCS | |
| | GKL; IWGCSGKLI; CTTAVPWNA; TTAVPWNAS; TAVPWNASW; VPW | |
| | NASWSN; KSLEQIWNH; QIWNHTTWM; HTTWMEWDR; TWMEWDR | |
| | EI; REINNYTSL; EINNYTSLI; NYTSLIHSL; YTSLIHSLI; SLIEESQNQ; Q | |
| | EKNEQELL; ELLELDKWA; LELDKWASL; KWASLWNWF; SLWNWFN | |
| | IT; NWFNITNWL; WFNITNWLW; FNITNWLWY; NITNWLWYI; ITNWL | |
| | WYIK; NWLWYIKLF; WLWYIKLFI; WYIKLFIMI; YIKLFIMIV; FIMIVGGL | |
| | V; MIVGGLVGL; IVGGLVGLR; GLVGLRIVF; LVGLRIVFA; VGLRIVFA | |
| | V; GLRIVFAVL; RIVFAVLSI; IVFAVLSIV; FAVLSIVNR; AVLSIVNRV; VL | |
| | SIVNRVR; IVNRVRQGY; RVRQGYSPL; RQGYSPLSF; SPLSFQTHL; | |
| | FQTHLPTPR; RDRDRSIRL; SIRLVNGSL; RLVNGSLAL; LVNGSLALI; | |
| | SLALIWDDL; LALIWDDLR; LIWDDLRSL; RSLCLFSYH; SLCLFSYHR; | |
| | CLFSYHRLR; SYHRLRDLL; YHRLRDLLL; RLRDLLLIV; RDLLLIVTR; | |
| | DLLLIVTRI; LLLIVTRIV; LIVTRIVEL; IVTRIVELL; RIVELLGRR; VELLG | |
| | RRGW; LLGRRGWEA; GRRGWEALK; RRGWEALKY; RGWEALKYW; | |
| | EALKYWWNL; ALKYWWNLL; KYWWNLLQY; YWWNLLQYW; LLQY | |
| | WSQEL; LQYWSQELK; SQELKNSAV; ELKNSAVSL; LKNSAVSLL; SA | |
| | VSLLNAT; SLLNATAIA; LLNATAIAV; TAIAVAEGT; IAVAEGTDR; AVA | |
| | EGTDRV; EGTDRVIEV; GTDRVIEVV; RVIEVVQGA; EVVQGACRA; V | |
| | QGACRAIR; RAIRHIPRR; AIRHIPRRI; IPRRIRQGL; RRIRQGLER; RI | |
| | RQGLERI; RQGLERILL | |
| | 10-mer | |
| | RVKEKYQHLW; KEKYQHLWRW; KYQHLWRWGW; YQHLWRWGW | |
| | R; HLWRWGWRWG; WRWGWRWGTM; RWGWRWGTML; WGWRW | |
| | GTMLL; WRWGTMLLGM; RWGTMLLGML; TMLLGMLMIC; MLLGML | |
| | MICS; LLGMLMICSA; MLMICSATEK; LMICSATEKL; SATEKLWVTV; | |
| | ATEKLWVTVY; TEKLWVTVYY; KLWVTVYYGV; WVTVYYGVPV; VTV | |
| | YYGVPVW; TVYYGVPVWK; VPVWKEATTT; PVWKEATTTL; VWKEA | |
| | TTTLF; TTTLFCASDA; TTLFCASDAK; TLFCASDAKA; LFCASDAKAY; | |
| | KAYDTEVHNV; AYDTEVHNVW; EVHNVWATHA; HNVWATHACV; P | |
| | TDPNPQEVV; DPNPQEVVLV; NPQEVVLVNV; VVLVNVTENF; NVTE | |
| | NFNMWK; NMWKNDMVEQ; EQMHEDIISL; DIISLWDQSL; IISLWDQS | |
| | LK; SLWDQSLKPC; KLTPLCVSLK; CVSLKCTDLK; DTNTNSSSGR; N | |
| | TNSSSGRMI; SSSGRMIMEK; RMIMEKGEIK; GEIKNCSFNI; NCSFNI | |
| | STSI; CSFNISTSIR; NISTSIRGKV; STSIRGKVQK; SIRGKVQKEY; RG | |
| | KVQKEYAF; KVQKEYAFFY; VQKEYAFFYK; EYAFFYKLDI; FFYKLDII | |
| | PI; IPIDNDTTSY; YKLTSCNTSV; KLTSCNTSVI; TSVITQACPK; SVITQ | |
| | ACPKV; ITQACPKVSF; VSFEPIPIHY; EPIPIHYCAP; IPIHYCAPAG; H | |
| | YCAPAGFAI; YCAPAGFAIL; CAPAGFAILK; FAILKCNNKT; AILKCNN | |
| | KTF; TGPCTNVSTV; STVQCTHGIR; VQCTHGIRPV; GIRPVVSTQL; R | |
| | PVVSTQLLL; STQLLLNGSL; TQLLLNGSLA; LLLNGSLAEE; LNGSLA | |
| | EEEV; SLAEEEVVIR; AEEEVVIRSV; EEVVIRSVNF; EVVIRSVNFT; R | |
| | SVNFTDNAK; FTDNAKTIIV; TIIVQLNTSV; NTSVEINCTR; CTRPNNN | |
| | TRK; RPNNNTRKRI; NTRKRIRIQR; RIRIQRGPGR; RIQRGPGRAF; IQ | |
| | RGPGRAFV; PGRAFVTIGK; FVTIGKIGNM; VTIGKIGNMR; MRQAHC | |
| | NISR; RQAHCNISRA; QAHCNISRAK; SRAKWNNTLK; NTLKQIASKL; | |
| | TLKQIASKLR; QIASKLREQF; KLREQFGNNK; REQFGNNKTI; QFGN | |
| | NKTIIF; FGNNKTIIFK; KQSSGGDPEI; HSFNCGGEFF; SFNCGGEFF | |
| | Y; EFFYCNSTQL; FFYCNSTQLF; NSTQLFNSTW; STQLFNSTWF; QL | |
| | FNSTWFNS; STWFNSTWST; GSDTITLPCR; DTITLPCRIK; TLPCRIK | |
| | QII; LPCRIKQIIN; RIKQIINMWQ; KQIINMWQKV; IINMWQKVGK; NMW | |
| | QKVGKAM; MWQKVGKAMY; WQKVGKAMYA; AMYAPPISGQ; MYA | |
| | PPISGQI; YAPPISGQIR; NSNNESEIFR; EIFRPGGGDM; DMRDNWR | |
| | SEL; MRDNWRSELY; RDNWRSELYK; SELYKYKVVK; ELYKYKVVKI; | |
| | KYKVVKIEPL; KVVKIEPLGV; EPLGVAPTKA; GVAPTKAKRR; APTKA | |
| | KRRVV; TKAKRRVVQR; AKRRVVQREK; KRRVVQREKR; RVVQREK | |
| | RAV; KRAVGIGALF; RAVGIGALFL; GIGALFLGFL; ALFLGFLGAA; FL | |
| | GFLGAAGS; FLGAAGSTMG; LGAAGSTMGA; GAAGSTMGAA; STM | |
| | GAASMTL; TMGAASMTLT; MGAASMTLTV; ASMTLTVQAR; SMTLTV | |
| | QARQ; MTLTVQARQL; TLTVQARQLL; VQARQLLSGI; QLLSGIVQQQ; | |
| | GIVQQQNNLL; IVQQQNNLLR; VQQQNNLLRA; QQQNNLLRAI; NLL | |
| | RAIEAQQ; RAIEAQQHLL; IEAQQHLLQL; AQQHLLQLTV; HLLQLTV | |
| | WGI; LLQLTVWGIK; QLTVWGIKQL; TVWGIKQLQA; VWGIKQLQAR; | |
| | KQLQARILAV; LQARILAVER; RILAVERYLK; VERYLKDQQL; YLKDQ | |
| | QLLGI; LLGIWGCSGK; GIWGCSGKLI; KLICTTAVPW; CTTAVPWNA | |
| | S; TTAVPWNASW; SWSNKSLEQI; WSNKSLEQIW; SLEQIWNHTT; E | |
| | QIWNHTTWM; IWNHTTWMEW; TTWMEWDREI; MEWDREINNY; RE | |
| | INNYTSLI; NYTSLIHSLI; SLIHSLIEES; SLIEESQNQQ; ELLELDKWAS; | |
| | LLELDKWASL; WASLWNWFNI; SLWNWFNITN; LWNWFNITNW; N | |
| | WFNITNWLW; WFNITNWLWY; FNITNWLWYI; NITNWLWYIK; ITNWL | |
| | WYIKL; NWLWYIKLFI; WLWYIKLFIM; LWYIKLFIMI; WYIKLFIMIV; KLF | |
| | IMIVGGL; IMIVGGLVGL; MIVGGLVGLR; GLVGLRIVFA; LVGLRIVFA | |
| | V; RIVFAVLSIV; VFAVLSIVNR; FAVLSIVNRV; AVLSIVNRVR; SIVNRV | |
| | RQGY; RVRQGYSPLS; VRQGYSPLSF; SFQTHLPTPR; ERDRDRSIR | |
| | L; IRLVNGSLAL; RLVNGSLALI; LVNGSLALIW; SLALIWDDLR; ALIWD | |
| | DLRSL; LIWDDLRSLC; DLRSLCLFSY; RSLCLFSYHR; SLCLFSYHRL; | |
| | LCLFSYHRLR; FSYHRLRDLL; SYHRLRDLLL; RLRDLLLIVT; DLLLIV | |
| | TRIV; LLIVTRIVEL; LIVTRIVELL; VTRIVELLGR; ELLGRRGWEA; LLG | |
| | RRGWEAL; LGRRGWEALK; GRRGWEALKY; RGWEALKYWW; WEA | |
| | LKYWWNL; EALKYWWNLL; LKYWWNLLQY; KYWWNLLQYW; NLLQ | |
| | YWSQEL; LLQYWSQELK; WSQELKNSAV; QELKNSAVSL; ELKNSA | |
| | VSLL; SLLNATAIAV; LLNATAIAVA; IAVAEGTDRV; AVAEGTDRVI; AE | |
| | GTDRVIEV; EGTDRVIEVV; EVVQGACRAI; VVQGACRAIR; ACRAIR | |
| | HIPR; AIRHIPRRIR; HIPRRIRQGL; RRIRQGLERI; RIRQGLERIL | |
| | 11-mer | |
| | RVKEKYQHLWR; KYQHLWRWGWR; YQHLWRWGWRW; HLWRW | |
| | GWRWGT; WRWGWRWGTML; RWGWRWGTMLL; WRWGTMLLGM | |
| | L; MLLGMLMICSA; LLGMLMICSAT; GMLMICSATEK; MLMICSATEKL; | |
| | LMICSATEKLW; MICSATEKLWV; CSATEKLWVTV; SATEKLWVTVY; | |
| | ATEKLWVTVYY; EKLWVTVYYGV; WVTVYYGVPVW; VTVYYGVPV | |
| | WK; VPVWKEATTTL; PVWKEATTTLF; TTTLFCASDAK; TTLFCASDA | |
| | KA; TLFCASDAKAY; KAYDTEVHNVW; NVWATHACVPT; CVPTDPN | |
| | PQEV; VPTDPNPQEVV; PTDPNPQEVVL; NPQEVVLVNVT; EVVLVN | |
| | VTENF; VLVNVTENFNM; LVNVTENFNMW; NMWKNDMVEQM; DMV | |
| | EQMHEDII; VEQMHEDIISL; DIISLWDQSLK; SLWDQSLKPCV; SLKP | |
| | CVKLTPL; KPCVKLTPLCV; KLTPLCVSLKC; DTNTNSSSGRM; NTNS | |
| | SSGRMIM; NSSSGRMIMEK; GRMIMEKGEIK; MEKGEIKNCSF; NCS | |
| | FNISTSIR; SFNISTSIRGK; ISTSIRGKVQK; TSIRGKVQKEY; SIRGKV | |
| | QKEYA; KVQKEYAFFYK; VQKEYAFFYKL; KEYAFFYKLDI; EYAFFY | |
| | KLDII; IIPIDNDTTSY; IPIDNDTTSYK; PIDNDTTSYKL; KLTSCNTSVIT; | |
| | NTSVITQACPK; QACPKVSFEPI; CPKVSFEPIPI; KVSFEPIPIHY; EPI | |
| | PIHYCAPA; IPIHYCAPAGF; HYCAPAGFAIL; AGFAILKCNNK; FAILK | |
| | CNNKTF; GTGPCTNVSTV; NVSTVQCTHGI; VSTVQCTHGIR; TVQC | |
| | THGIRPV; GIRPVVSTQLL; LLLNGSLAEEE; LLNGSLAEEEV; SLAEE | |
| | EVVIRS; EEEVVIRSVNF; EEVVIRSVNFT; NFTDNAKTIIV; KTIIVQLN | |
| | TSV; IIVQLNTSVEI; QLNTSVEINCT; LNTSVEINCTR; CTRPNNNTRK | |
| | R; RPNNNTRKRIR; NNTRKRIRIQR; KRIRIQRGPGR; RIQRGPGRAF | |
| | V; IQRGPGRAFVT; FVTIGKIGNMR; NMRQAHCNISR; RQAHCNISRA | |
| | K; NISRAKWNNTL; ISRAKWNNTLK; NTLKQIASKLR; KQIASKLREQF; | |
| | KLREQFGNNKT; REQFGNNKTII; EQFGNNKTIIF; QFGNNKTIIFK; K | |
| | QSSGGDPEIV; HSFNCGGEFFY; GEFFYCNSTQL; EFFYCNSTQLF; | |
| | QLFNSTWFNST; LFNSTWFNSTW; STWSTEGSNNT; EGSDTITLPC | |
| | R; LPCRIKQIINM; RIKQIINMWQK; QIINMWQKVGK; IINMWQKVGKA; | |
| | NMWQKVGKAMY; KVGKAMYAPPI; AMYAPPISGQI; MYAPPISGQIR; | |
| | QIRCSSNITGL; SSNITGLLLTR; SEIFRPGGGDM; EIFRPGGGDMR; | |
| | RPGGGDMRDNW; DMRDNWRSELY; RSELYKYKVVK; YKYKVVKIE | |
| | PL; KIEPLGVAPTK; GVAPTKAKRRV; APTKAKRRVVQ; PTKAKRRVV | |
| | QR; KAKRRVVQREK; RRVVQREKRAV; REKRAVGIGAL; AVGIGALF | |
| | LGF; FLGFLGAAGST; FLGAAGSTMGA; STMGAASMTLT; TMGAAS | |
| | MTLTV; AASMTLTVQAR; SMTLTVQARQL; MTLTVQARQLL; TVQAR | |
| | QLLSGI; VQARQLLSGIV; GIVQQQNNLLR; VQQQNNLLRAI; QQNNL | |
| | LRAIEA; LLRAIEAQQHL; AIEAQQHLLQL; EAQQHLLQLTV; HLLQLTV | |
| | WGIK; LQLTVWGIKQL; QLTVWGIKQLQ; TVWGIKQLQAR; VWGIKQ | |
| | LQARI; KQLQARILAVE; QLQARILAVER; LQARILAVERY; ARILAVER | |
| | YLK; AVERYLKDQQL; VERYLKDQQLL; RYLKDQQLLGI; QLLGIWGC | |
| | SGK; LLGIWGCSGKL; CTTAVPWNASW; TTAVPWNASWS; AVPWN | |
| | ASWSNK; VPWNASWSNKS; QIWNHTTWMEW; WMEWDREINNY; W | |
| | DREINNYTSL; SLIHSLIEESQ; SLIEESQNQQE; QEKNEQELLEL; ELL | |
| | ELDKWASL; KWASLWNWFNI; WASLWNWFNIT; SLWNWFNITNW; L | |
| | WNWFNITNWL; NWFNITNWLWY; WFNITNWLWYI; NITNWLWYIKL; I | |
| | TNWLWYIKLF; WLWYIKLFIMI; KLFIMIVGGLV; FIMIVGGLVGL; IMIV | |
| | GGLVGLR; MIVGGLVGLRI; IVGGLVGLRIV; GLVGLRIVFAV; GLRIVF | |
| | AVLSI; IVFAVLSIVNR; FAVLSIVNRVR; LSIVNRVRQGY; RVRQGYSP | |
| | LSF; RQGYSPLSFQT; GYSPLSFQTHL; SPLSFQTHLPT; LSFQTHLP | |
| | TPR; TPRGPDRPEGI; GERDRDRSIRL; SIRLVNGSLAL; RLVNGSLAL | |
| | IW; GSLALIWDDLR; ALIWDDLRSLC; LIWDDLRSLCL; IWDDLRSLCL | |
| | F; SLCLFSYHRLR; CLFSYHRLRDL; SYHRLRDLLLI; RLRDLLLIVTR; L | |
| | LLIVTRIVEL; LLIVTRIVELL; IVTRIVELLGR; VTRIVELLGRR; ELLGRR | |
| | GWEAL; LLGRRGWEALK; GWEALKYWWNL; WEALKYWWNLL; ALK | |
| | YWWNLLQY; LKYWWNLLQYW; NLLQYWSQELK; SQELKNSAVSL; | |
| | QELKNSAVSLL; SAVSLLNATAI; AVSLLNATAIA; SLLNATAIAVA; NA | |
| | TAIAVAEGT; TAIAVAEGTDR; AIAVAEGTDRV; VAEGTDRVIEV; AEG | |
| | TDRVIEVV; RVIEVVQGACR; EVVQGACRAIR; GACRAIRHIPR; ACR | |
| | AIRHIPRR; RAIRHIPRRIR; RRIRQGLERIL; RIRQGLERILL | |
| | 15-mer + 9-mer core | |
| | ACRAIRHIPRRIRQG; IRHIPRRIR; ACVPTDPNPQEVVLV; VPTDPNP | |
| | QE; AEEEVVIRSVNFTDN; VVIRSVNFT; AFFYKLDIIPIDNDT; YKLDII | |
| | PID; AGSTMGAASMTLTVQ; MGAASMTLT; AKTIIVQLNTSVEIN; IVQ | |
| | LNTSVE; AKTIIVQLNTSVEIN; VQLNTSVEI; AKWNNTLKQIASKLR; N | |
| | TLKQIASK; AKWNNTLKQIASKLR; TLKQIASKL; AKWNNTLKQIASKL | |
| | R; WNNTLKQIA; ALFLGFLGAAGSTMG; FLGFLGAAG; ALFLGFLGAA | |
| | GSTMG; FLGAAGSTM; ALIWDDLRSLCLFSY; WDDLRSLCL; ALKYW | |
| | WNLLQYWSQE; LKYWWNLLQ; ALKYWWNLLQYWSQE; WWNLLQ | |
| | YWS; ALKYWWNLLQYWSQE; YWWNLLQYW; AMYAPPISGQIRCSS; | |
| | YAPPISGQI; AQQHLLQLTVWGIKQ; LLQLTVWGI; ARQLLSGIVQQQ | |
| | NNL; LLSGIVQQQ; ASLWNWFNITNWLWY; LWNWFNITN; ASLWNW | |
| | FNITNWLWY; WFNITNWLW; ASLWNWFNITNWLWY; WNWFNITNW; | |
| | ASMTLTVQARQLLSG; LTVQARQLL; ATAIAVAEGTDRVIE; IAVAEG | |
| | TDR; ATEKLWVTVYYGVPV; EKLWVTVYY; ATHACVPTDPNPQEV; V | |
| | PTDPNPQE; ATTTLFCASDAKAYD; FCASDAKAY; AVGIGALFLGFL | |
| | GAA; AVGIGALFL; AVLSIVNRVRQGYSP; LSIVNRVRQ; AVPWNASW | |
| | SNKSLEQ; WNASWSNKS; AVSLLNATAIAVAEG; LLNATAIAV; AYDT | |
| | EVHNVWATHAC; VHNVWATHA; CGGEFFYCNSTQLFN; FYCNSTQ | |
| | LF; CLFSYHRLRDLLLIV; YHRLRDLLL; CNISRAKWNNTLKQI; RAKW | |
| | NNTLK; CNNKTFNGTGPCTNV; FNGTGPCTN; CNSTQLFNSTWFNS | |
| | T; LFNSTWFNS; CNTSVITQACPKVSF; ITQACPKVS; CRAIRHIPRRI | |
| | RQGL; IRHIPRRIR; CRIKQIINMWQKVGK; IINMWQKVG; CRIKQIINM | |
| | WQKVGK; IKQIINMWQ; CSFNISTSIRGKVQK; FNISTSIRG; CSGKLIC | |
| | TTAVPWNA; GKLICTTAV; CSGKLICTTAVPWNA; LICTTAVPW; CSS | |
| | NITGLLLTRDGG; ITGLLLTRD; CTDLKNDTNTNSSSG; LKNDTNTNS; | |
| | CTHGIRPVVSTQLLL; IRPVVSTQL; CTRPNNNTRKRIRIQ; PNNNTR | |
| | KRI; CTTAVPWNASWSNKS; AVPWNASWS; CTTAVPWNASWSNKS; | |
| | CTTAVPWNA; CTTAVPWNASWSNKS; TTAVPWNAS; CTTAVPWN | |
| | ASWSNKS; VPWNASWSN; CVKLTPLCVSLKCTD; LTPLCVSLK; DDL | |
| | RSLCLFSYHRLR; LRSLCLFSY; DIISLWDQSLKPCVK; LWDQSLKPC; | |
| | DKWASLWNWFNITNW; WASLWNWFN; DLLLIVTRIVELLGR; IVTRI | |
| | VELL; DLLLIVTRIVELLGR; LIVTRIVEL; DLLLIVTRIVELLGR; LLIVTRI | |
| | VE; DLRSLCLFSYHRLRD; LRSLCLFSY; DMRDNWRSELYKYKV; WR | |
| | SELYKYK; DNAKTIIVQLNTSVE; IIVQLNTSV; DNAKTIIVQLNTSVE; TI | |
| | IVQLNTS; DNWRSELYKYKVVKI; WRSELYKYK; DRDRSIRLVNGSL | |
| | AL; IRLVNGSLA; DREINNYTSLIHSLI; INNYTSLIH; DRSIRLVNGSLAL | |
| | IW; IRLVNGSLA; DRSIRLVNGSLALIW; LVNGSLALI; DRVIEVVQGAC | |
| | RAIR; VVQGACRAI; DTEVHNVWATHACVP; VHNVWATHA; DTTSYK | |
| | LTSCNTSVI; SYKLTSCNT; DTTSYKLTSCNTSVI; YKLTSCNTS; EALK | |
| | YWWNLLQYWSQ; LKYWWNLLQ; EALKYWWNLLQYWSQ; WWNLL | |
| | QYWS; EALKYWWNLLQYWSQ; YWWNLLQYW; EAQQHLLQLTVW | |
| | GIK; LLQLTVWGI; EATTTLFCASDAKAY; LFCASDAKA; EDIISLWDQ | |
| | SLKPCV; LWDQSLKPC; EEEVVIRSVNFTDNA; VVIRSVNFT; EEVVIR | |
| | SVNFTDNAK; VVIRSVNFT; EFFYCNSTQLFNSTW; FYCNSTQLF; EI | |
| | KNCSFNISTSIRG; IKNCSFNIS; EIKNCSFNISTSIRG; SFNISTSIR; EI | |
| | NCTRPNNNTRKRI; RPNNNTRKR; EINCTRPNNNTRKRI; TRPNNNT | |
| | RK; EINNYTSLIHSLIEE; YTSLIHSLI; EKGEIKNCSFNISTS; IKNCSFNI | |
| | S; EKRAVGIGALFLGFL; VGIGALFLG; EKYQHLWRWGWRWGT; LW | |
| | RWGWRWG; EKYQHLWRWGWRWGT; QHLWRWGWR; EKYQHLW | |
| | RWGWRWGT; YQHLWRWGW; ELDKWASLWNWFNIT; WASLWNW | |
| | FN; ELKNSAVSLLNATAI; LKNSAVSLL; ELLELDKWASLWNWF; LDK | |
| | WASLWN; ELYKYKVVKIEPLGV; YKVVKIEPL; ELYKYKVVKIEPLGV; | |
| | YKYKVVKIE; ENFNMWKNDMVEQMH; FNMWKNDMV; ENFNMWKN | |
| | DMVEQMH; WKNDMVEQM; EPIPIHYCAPAGFAI; HYCAPAGFA; EPL | |
| | GVAPTKAKRRVV; VAPTKAKRR; EQELLELDKWASLWN; LLELDKW | |
| | AS; EQFGNNKTIIFKQSS; FGNNKTIIF; EQIWNHTTWMEWDRE; IWN | |
| | HTTWME; EVHNVWATHACVPTD; WATHACVPT; EVVIRSVNFTDNA | |
| | KT; VVIRSVNFT; EVVLVNVTENFNMWK; LVNVTENFN; EVVQGACR | |
| | AIRHIPR; VVQGACRAI; EWDREINNYTSLIHS; INNYTSLIH; EYAFFY | |
| | KLDIIPIDN; YKLDIIPID; FAVLSIVNRVRQGYS; LSIVNRVRQ; FAVLSI | |
| | VNRVRQGYS; VLSIVNRVR; FFYKLDIIPIDNDTT; YKLDIIPID; FGNNK | |
| | TIIFKQSSGG; FGNNKTIIF; FIMIVGGLVGLRIVF; IMIVGGLVG; FIMIV | |
| | GGLVGLRIVF; IVGGLVGLR; FIMIVGGLVGLRIVF; VGGLVGLRI; FLG | |
| | FLGAAGSTMGAA; FLGAAGSTM; FLGFLGAAGSTMGAA; LGAAGST | |
| | MG; FLGAAGSTMGAASMT; LGAAGSTMG; FNGTGPCTNVSTVQC; F | |
| | NGTGPCTN; FNISTSIRGKVQKEY; FNISTSIRG; FNITNWLWYIKLFI | |
| | M; FNITNWLWY; FNITNWLWYIKLFIM; ITNWLWYIK; FNMWKNDMVE | |
| | QMHED; FNMWKNDMV; FNMWKNDMVEQMHED; WKNDMVEQM; F | |
| | NSTWFNSTWSTEGS; FNSTWSTEG; FNSTWFNSTWSTEGS; WFN | |
| | STWSTE; FNSTWSTEGSNNTEG; FNSTWSTEG; FNSTWSTEGSNN | |
| | TEG; WSTEGSNNT; FQTHLPTPRGPDRPE; FQTHLPTPR; FSYHRLR | |
| | DLLLIVTR; LRDLLLIVT; FVTIGKIGNMRQAHC; IGKIGNMRQ; GACRA | |
| | IRHIPRRIRQ; IRHIPRRIR; GALFLGFLGAAGSTM; FLGFLGAAG; GAL | |
| | FLGFLGAAGSTM; LGFLGAAGS; GCSGKLICTTAVPWN; GKLICTTA | |
| | V; GCSGKLICTTAVPWN; LICTTAVPW; GDMRDNWRSELYKYK; RD | |
| | NWRSELY; GEFFYCNSTQLFNST; FYCNSTQLF; GEIKNCSFNISTSI | |
| | R; IKNCSFNIS; GFAILKCNNKTFNGT; LKCNNKTFN; GFLGAAGSTM | |
| | GAASM; LGAAGSTMG; GGEFFYCNSTQLFNS; FYCNSTQLF; GGLV | |
| | GLRIVFAVLSI; LRIVFAVLS; GGLVGLRIVFAVLSI; VGLRIVFAV; GIGA | |
| | LFLGFLGAAGS; FLGFLGAAG; GIKQLQARILAVERY; IKQLQARIL; GI | |
| | RPVVSTQLLLNGS; IRPVVSTQL; GIVQQQNNLLRAIEA; VQQQNNLL | |
| | R; GKAMYAPPISGQIRC; YAPPISGQI; GKLICTTAVPWNASW; ICTTA | |
| | VPWN; GKLICTTAVPWNASW; LICTTAVPW; GLRIVFAVLSIVNRV; F | |
| | AVLSIVNR; GLRIVFAVLSIVNRV; LRIVFAVLS; GLVGLRIVFAVLSIV; L | |
| | RIVFAVLS; GLVGLRIVFAVLSIV; VGLRIVFAV; GMLMICSATEKLWV | |
| | T; MICSATEKL; GRAFVTIGKIGNMRQ; FVTIGKIGN; GSLALIWDDLR | |
| | SLCL; LIWDDLRSL; GSTMGAASMTLTVQA; MGAASMTLT; GTMLLG | |
| | MLMICSATE; LLGMLMICS; GVAPTKAKRRVVQRE; PTKAKRRVV; G | |
| | VAPTKAKRRVVQRE; VAPTKAKRR; GVPVWKEATTTLFCA; WKEAT | |
| | TTLF; GWEALKYWWNLLQYW; LKYWWNLLQ; GWRWGTMLLGMLM | |
| | IC; WGTMLLGML; GWRWGTMLLGMLMIC; WRWGTMLLG; GYSPLS | |
| | FQTHLPTPR; LSFQTHLPT; GYSPLSFQTHLPTPR; YSPLSFQTH; GA | |
| | AGSTMGAASMTLT; STMGAASMT; GAAGSTMGAASMTLT; TMGAA | |
| | SMTL; GAASMTLTVQARQLL; TLTVQARQL; HACVPTDPNPQEVVL; | |
| | VPTDPNPQE; HCNISRAKWNNTLKQ; RAKWNNTLK; HEDIISLWDQ | |
| | SLKPC; IISLWDQSL; HEDIISLWDQSLKPC; ISLWDQSLK; HGIRPVV | |
| | STQLLLNG; IRPVVSTQL; HLLQLTVWGIKQLQA; LLQLTVWGI; HLW | |
| | RWGWRWGTMLLG; GWRWGTMLL; HLWRWGWRWGTMLLG; LWR | |
| | WGWRWG; HLWRWGWRWGTMLLG; WGWRWGTML; HNVWATHA | |
| | CVPTDPN; WATHACVPT; HRLRDLLLIVTRIVE; LLLIVTRIV; HRLRDL | |
| | LLIVTRIVE; LRDLLLIVT; HTTWMEWDREINNYT; MEWDREINN; IASK | |
| | LREQFGNNKTI; LREQFGNNK; ICTTAVPWNASWSNK; VPWNASWS | |
| | N; IEAQQHLLQLTVWGI; AQQHLLQLT; IEPLGVAPTKAKRRV; VAPTK | |
| | AKRR; IEVVQGACRAIRHIP; VVQGACRAI; IGALFLGFLGAAGST; FL | |
| | GFLGAAG; IGALFLGFLGAAGST; LGFLGAAGS; IHYCAPAGFAILKC | |
| | N; YCAPAGFAI; IIFKQSSGGDPEIVT; FKQSSGGDP; IINMWQKVGKA | |
| | MYAP; INMWQKVGK; IINMWQKVGKAMYAP; MWQKVGKAM; IINMW | |
| | QKVGKAMYAP; WQKVGKAMY; IISLWDQSLKPCVKL; LWDQSLKPC; | |
| | IIVQLNTSVEINCTR; IVQLNTSVE; IIVQLNTSVEINCTR; VQLNTSVEI; | |
| | IKLFIMIVGGLVGLR; FIMIVGGLV; IKLFIMIVGGLVGLR; IKLFIMIVG; I | |
| | KLFIMIVGGLVGLR; IMIVGGLVG; IKNCSFNISTSIRGK; FNISTSIRG; I | |
| | KNCSFNISTSIRGK; IKNCSFNIS; IKQIINMWQKVGKAM; IINMWQKV | |
| | G; IKQIINMWQKVGKAM; INMWQKVGK; IKQLQARILAVERYL; IKQLQ | |
| | ARIL; IMEKGEIKNCSFNIS; EKGEIKNCS; IMIVGGLVGLRIVFA; IMIVG | |
| | GLVG; IMIVGGLVGLRIVFA; IVGGLVGLR; IMIVGGLVGLRIVFA; VGG | |
| | LVGLRI; INCTRPNNNTRKRIR; PNNNTRKRI; INCTRPNNNTRKRIR; T | |
| | RPNNNTRK; INMWQKVGKAMYAPP; MWQKVGKAM; INMWQKVGK | |
| | AMYAPP; WQKVGKAMY; INNYTSLIHSLIEES; YTSLIHSLI; IPIHYCAP | |
| | AGFAILK; YCAPAGFAI; IQRGPGRAFVTIGKI; IQRGPGRAF; IRCSSNI | |
| | TGLLLTRD; IRCSSNITG; IRIQRGPGRAFVTIG; IQRGPGRAF; IRIQR | |
| | GPGRAFVTIG; IRIQRGPGR; IRLVNGSLALIWDDL; IRLVNGSLA; IRL | |
| | VNGSLALIWDDL; LVNGSLALI; IRPVVSTQLLLNGSL; IRPVVSTQL; IS | |
| | LWDQSLKPCVKLT; LWDQSLKPC; ISRAKWNNTLKQIAS; RAKWNN | |
| | TLK; ISRAKWNNTLKQIAS; WNNTLKQIA; ITGLLLTRDGGNSNN; ITG | |
| | LLLTRD; ITNWLWYIKLFIMIV; ITNWLWYIK; ITNWLWYIKLFIMIV; LW | |
| | YIKLFIM; ITNWLWYIKLFIMIV; WYIKLFIMI; ITQACPKVSFEPIPI; ITQA | |
| | CPKVS; IVELLGRRGWEALKY; IVELLGRRG; IVELLGRRGWEALKY; | |
| | LLGRRGWEA; IVFAVLSIVNRVRQG; FAVLSIVNR; IVFAVLSIVNRVR | |
| | QG; LSIVNRVRQ; IVFAVLSIVNRVRQG; VLSIVNRVR; IVGGLVGLRIV | |
| | FAVL; LVGLRIVFA; IVGGLVGLRIVFAVL; VGLRIVFAV; IVNRVRQGY | |
| | SPLSFQ; VRQGYSPLS; IVQLNTSVEINCTRP; VQLNTSVEI; IVQQQN | |
| | NLLRAIEAQ; IVQQQNNLL; IVQQQNNLLRAIEAQ; VQQQNNLLR; IVT | |
| | RIVELLGRRGWE; IVELLGRRG; IVTRIVELLGRRGWE; TRIVELLGR; I | |
| | WDDLRSLCLFSYHR; LRSLCLFSY; IWNHTTWMEWDREIN; IWNHTT | |
| | WME; KAMYAPPISGQIRCS; YAPPISGQI; KAYDTEVHNVWATHA; TE | |
| | VHNVWAT; KCNNKTFNGTGPCTN; TFNGTGPCT; KCTDLKNDTNTN | |
| | SSS; LKNDTNTNS; KEKYQHLWRWGWRWG; QHLWRWGWR; KEKY | |
| | QHLWRWGWRWG; YQHLWRWGW; KEYAFFYKLDIIPID; FYKLDIIPI; | |
| | KEYAFFYKLDIIPID; YAFFYKLDI; KGEIKNCSFNISTSI; IKNCSFNIS; | |
| | KIEPLGVAPTKAKRR; LGVAPTKAK; KLFIMIVGGLVGLRI; IMIVGGLV | |
| | G; KLFIMIVGGLVGLRI; IVGGLVGLR; KLICTTAVPWNASWS; ICTTAV | |
| | PWN; KLICTTAVPWNASWS; LICTTAVPW; KLREQFGNNKTIIFK; FG | |
| | NNKTIIF; KLTSCNTSVITQACP; LTSCNTSVI; KLWVTVYYGVPVWKE; | |
| | VTVYYGVPV; KNCSFNISTSIRGKV; FNISTSIRG; KNSAVSLLNATAI | |
| | AV; VSLLNATAI; KPCVKLTPLCVSLKC; LTPLCVSLK; KQIINMWQKV | |
| | GKAMY; INMWQKVGK; KQIINMWQKVGKAMY; MWQKVGKAM; KRA | |
| | VGIGALFLGFLG; VGIGALFLG; KRIRIQRGPGRAFVT; IQRGPGRAF; | |
| | KRIRIQRGPGRAFVT; IRIQRGPGR; KSLEQIWNHTTWMEW; IWNHT | |
| | TWME; KTFNGTGPCTNVSTV; FNGTGPCTN; KTIIFKQSSGGDPEI; F | |
| | KQSSGGDP; KTIIVQLNTSVEINC; IVQLNTSVE; KTIIVQLNTSVEINC; | |
| | VQLNTSVEI; KVGKAMYAPPISGQI; GKAMYAPPI; KVVKIEPLGVAPT | |
| | KA; IEPLGVAPT; KWASLWNWFNITNWL; WASLWNWFN; KWNNTLK | |
| | QIASKLRE; LKQIASKLR; KYKVVKIEPLGVAPT; VKIEPLGVA; KYKVV | |
| | KIEPLGVAPT; VVKIEPLGV; KYQHLWRWGWRWGTM; LWRWGWR | |
| | WG; KYQHLWRWGWRWGTM; QHLWRWGWR; KYWWNLLQYWSQ | |
| | ELK; KYWWNLLQY; KYWWNLLQYWSQELK; WNLLQYWSQ; KYWW | |
| | NLLQYWSQELK; YWWNLLQYW; LAEEEVVIRSVNFTD; VVIRSVNFT; | |
| | LALIWDDLRSLCLFS; WDDLRSLCL; LCLFSYHRLRDLLLI; YHRLRD | |
| | LLL; LDKWASLWNWFNITN; WASLWNWFN; LELDKWASLWNWFNI; | |
| | WASLWNWFN; LEQIWNHTTWMEWDR; IWNHTTWME; LEQIWNHT | |
| | TWMEWDR; WNHTTWMEW; LFIMIVGGLVGLRIV; IMIVGGLVG; LFI | |
| | MIVGGLVGLRIV; VGGLVGLRI; LFLGFLGAAGSTMGA; FLGFLGAAG; | |
| | LFLGFLGAAGSTMGA; FLGAAGSTM; LFLGFLGAAGSTMGA; LGAA | |
| | GSTMG; LFNSTWFNSTWSTEG; FNSTWFNST; LFNSTWFNSTWST | |
| | EG; LFNSTWFNS; LFNSTWFNSTWSTEG; STWFNSTWS; LFNSTWF | |
| | NSTWSTEG; TWFNSTWST; LFNSTWFNSTWSTEG; WFNSTWSTE; | |
| | LFSYHRLRDLLLIVT; YHRLRDLLL; LGFLGAAGSTMGAAS; LGAAGS | |
| | TMG; LGMLMICSATEKLWV; MLMICSATE; LGVAPTKAKRRVVQR; P | |
| | TKAKRRVV; LGVAPTKAKRRVVQR; VAPTKAKRR; LGAAGSTMGAA | |
| | SMTL; LGAAGSTMG; LICTTAVPWNASWSN; LICTTAVPW; LICTTAV | |
| | PWNASWSN; TTAVPWNAS; LIVTRIVELLGRRGW; IVELLGRRG; LIV | |
| | TRIVELLGRRGW; TRIVELLGR; LIWDDLRSLCLFSYH; WDDLRSLCL; | |
| | LKCTDLKNDTNTNSS; LKNDTNTNS; LKNSAVSLLNATAIA; LKNSAV | |
| | SLL; LKPCVKLTPLCVSLK; CVKLTPLCV; LKQIASKLREQFGNN; LKQ | |
| | IASKLR; LKYWWNLLQYWSQEL; LKYWWNLLQ; LKYWWNLLQYWS | |
| | QEL; YWWNLLQYW; LLELDKWASLWNWFN; LDKWASLWN; LLGML | |
| | MICSATEKLW; LLGMLMICS; LLIVTRIVELLGRRG; IVTRIVELL; LLIVT | |
| | RIVELLGRRG; LLIVTRIVE; LLIVTRIVELLGRRG; TRIVELLGR; LLLIV | |
| | TRIVELLGRR; IVTRIVELL; LLLIVTRIVELLGRR; LIVTRIVEL; LLLIVTR | |
| | IVELLGRR; LLIVTRIVE; LLLIVTRIVELLGRR; TRIVELLGR; LLNATAIA | |
| | VAEGTDR; LLNATAIAV; LLQLTVWGIKQLQAR; LLQLTVWGI; LLQY | |
| | WSQELKNSAVS; WSQELKNSA; LLQYWSQELKNSAVS; YWSQELK | |
| | NS; LLRAIEAQQHLLQLT; LRAIEAQQH; LLSGIVQQQNNLLRA; IVQQ | |
| | QNNLL; LLSGIVQQQNNLLRA; VQQQNNLLR; LNATAIAVAEGTDRV; | |
| | LNATAIAVA; LQLTVWGIKQLQARI; WGIKQLQAR; LQYWSQELKNS | |
| | AVSL; YWSQELKNS; LRAIEAQQHLLQLTV; LRAIEAQQH; LRDLLLIV | |
| | TRIVELL; LIVTRIVEL; LRDLLLIVTRIVELL; LLIVTRIVE; LRDLLLIVTRI | |
| | VELL; LRDLLLIVT; LREQFGNNKTIIFKQ; FGNNKTIIF; LRIVFAVLSIV | |
| | NRVR; FAVLSIVNR; LRIVFAVLSIVNRVR; LRIVFAVLS; LRIVFAVLSIV | |
| | NRVR; VFAVLSIVN; LRSLCLFSYHRLRDL; LRSLCLFSY; LSFQTHLP | |
| | TPRGPDR; FQTHLPTPR; LSFQTHLPTPRGPDR; QTHLPTPRG; LSGI | |
| | VQQQNNLLRAI; IVQQQNNLL; LSGIVQQQNNLLRAI; VQQQNNLLR; | |
| | LSIVNRVRQGYSPLS; IVNRVRQGY; LSIVNRVRQGYSPLS; RVRQG | |
| | YSPL; LSIVNRVRQGYSPLS; VNRVRQGYS; LTSCNTSVITQACPK; L | |
| | TSCNTSVI; LTVQARQLLSGIVQQ; LTVQARQLL; LTVQARQLLSGIV | |
| | QQ; VQARQLLSG; LTVWGIKQLQARILA; IKQLQARIL; LTVWGIKQLQ | |
| | ARILA; WGIKQLQAR; LVGLRIVFAVLSIVN; LRIVFAVLS; LVNGSLALI | |
| | WDDLRS; LVNGSLALI; LWNWFNITNWLWYIK; FNITNWLWY; LWNW | |
| | FNITNWLWYIK; WFNITNWLW; LWRWGWRWGTMLLGM; GWRWG | |
| | TMLL; LWRWGWRWGTMLLGM; LWRWGWRWG; LWRWGWRWGT | |
| | MLLGM; WRWGTMLLG; LWVTVYYGVPVWKEA; YYGVPVWKE; LW | |
| | YIKLFIMIVGGLV; IKLFIMIVG; LWYIKLFIMIVGGLV; YIKLFIMIV; LYKY | |
| | KVVKIEPLGVA; VVKIEPLGV; LYKYKVVKIEPLGVA; YKVVKIEPL; ME | |
| | KGEIKNCSFNIST; IKNCSFNIS; MEWDREINNYTSLIH; EINNYTSLI; M | |
| | EWDREINNYTSLIH; MEWDREINN; MGAASMTLTVQARQL; MGAAS | |
| | MTLT; MHEDIISLWDQSLKP; ISLWDQSLK; MIVGGLVGLRIVFAV; IV | |
| | GGLVGLR; MIVGGLVGLRIVFAV; LVGLRIVFA; MIVGGLVGLRIVFAV; | |
| | VGGLVGLRI; MLLGMLMICSATEKL; LLGMLMICS; MRDNWRSELYK | |
| | YKVV; WRSELYKYK; MRVKEKYQHLWRWGW; MRVKEKYQH; MTLT | |
| | VQARQLLSGIV; LTVQARQLL; MTLTVQARQLLSGIV; VQARQLLSG; | |
| | MWQKVGKAMYAPPIS; QKVGKAMYA; NAKTIIVQLNTSVEI; IIVQLNT | |
| | SV; NAKTIIVQLNTSVEI; IVQLNTSVE; NATAIAVAEGTDRVI; TAIAVA | |
| | EGT; NCSFNISTSIRGKVQ; FNISTSIRG; NCTRPNNNTRKRIRI; PNN | |
| | NTRKRI; NCTRPNNNTRKRIRI; TRPNNNTRK; NFNMWKNDMVEQM | |
| | HE; FNMWKNDMV; NFNMWKNDMVEQMHE; WKNDMVEQM; NHTT | |
| | WMEWDREINNY; MEWDREINN; NISRAKWNNTLKQIA; AKWNNTLK | |
| | Q; NISRAKWNNTLKQIA; RAKWNNTLK; NITGLLLTRDGGNSN; ITGLL | |
| | LTRD; NITNWLWYIKLFIMI; ITNWLWYIK; NKSLEQIWNHTTWME; LE | |
| | QIWNHTT; NKTFNGTGPCTNVST; FNGTGPCTN; NKTIIFKQSSGGD | |
| | PE; FKQSSGGDP; NLLQYWSQELKNSAV; LQYWSQELK; NLLQYWS | |
| | QELKNSAV; YWSQELKNS; NLLRAIEAQQHLLQL; LRAIEAQQH; NM | |
| | WQKVGKAMYAPPI; QKVGKAMYA; NMWQKVGKAMYAPPI; WQKV | |
| | GKAMY; NNKTFNGTGPCTNVS; FNGTGPCTN; NNKTIIFKQSSGGD | |
| | P; IFKQSSGGD; NNLLRAIEAQQHLLQ; LRAIEAQQH; NNTLKQIASKL | |
| | REQF; LKQIASKLR; NNTRKRIRIQRGPGR; TRKRIRIQR; NPQEVVLV | |
| | NVTENFN; VVLVNVTEN; NRVRQGYSPLSFQTH; VRQGYSPLS; NSA | |
| | VSLLNATAIAVA; LLNATAIAV; NSTQLFNSTWFNSTW; FNSTWFNST; | |
| | NSTQLFNSTWFNSTW; LFNSTWFNS; NSTWFNSTWSTEGSN; FNS | |
| | TWSTEG; NSTWFNSTWSTEGSN; WFNSTWSTE; NSTWSTEGSNN | |
| | TEGS; WSTEGSNNT; NTLKQIASKLREQFG; LKQIASKLR; NTRKRIRI | |
| | QRGPGRA; IRIQRGPGR; NTSVITQACPKVSFE; ITQACPKVS; NVTE | |
| | NFNMWKNDMVE; FNMWKNDMV; NVWATHACVPTDPNP; HACVPT | |
| | DPN; NVWATHACVPTDPNP; WATHACVPT; NWFNITNWLWYIKLF; F | |
| | NITNWLWY; NWFNITNWLWYIKLF; ITNWLWYIK; NWFNITNWLWYI | |
| | KLF; WFNITNWLW; NWLWYIKLFIMIVGG; IKLFIMIVG; NWLWYIKLFI | |
| | MIVGG; LWYIKLFIM; NWLWYIKLFIMIVGG; YIKLFIMIV; NWRSELYK | |
| | YKVVKIE; WRSELYKYK; PCRIKQIINMWQKVG; IKQIINMWQ; PCVKL | |
| | TPLCVSLKCT; LTPLCVSLK; PIHYCAPAGFAILKC; YCAPAGFAI; PIPI | |
| | HYCAPAGFAIL; YCAPAGFAI; PLGVAPTKAKRRVVQ; PTKAKRRVV; | |
| | PLGVAPTKAKRRVVQ; VAPTKAKRR; PLSFQTHLPTPRGPD; FQTHL | |
| | PTPR; PLSFQTHLPTPRGPD; QTHLPTPRG; PNPQEVVLVNVTENF; | |
| | VVLVNVTEN; PQEVVLVNVTENFNM; LVNVTENFN; PVVSTQLLLNG | |
| | SLAE; VSTQLLLNG; PVWKEATTTLFCASD; WKEATTTLF; PWNASW | |
| | SNKSLEQIW; WNASWSNKS; QARQLLSGIVQQQNN; LLSGIVQQQ; | |
| | QCTHGIRPVVSTQLL; IRPVVSTQL; QELKNSAVSLLNATA; LKNSAV | |
| | SLL; QELLELDKWASLWNW; LDKWASLWN; QEVVLVNVTENFNMW; | |
| | LVNVTENFN; QFGNNKTIIFKQSSG; FGNNKTIIF; QGACRAIRHIPRR | |
| | IR; RAIRHIPRR; QHLLQLTVWGIKQLQ; LLQLTVWGI; QHLWRWGW | |
| | RWGTMLL; LWRWGWRWG; QHLWRWGWRWGTMLL; QHLWRWG | |
| | WR; QHLWRWGWRWGTMLL; WGWRWGTML; QIASKLREQFGNNK | |
| | T; LREQFGNNK; QIINMWQKVGKAMYA; INMWQKVGK; QIINMWQK | |
| | VGKAMYA; MWQKVGKAM; QIINMWQKVGKAMYA; WQKVGKAMY; | |
| | QIWNHTTWMEWDREI; IWNHTTWME; QKVGKAMYAPPISGQ; GKA | |
| | MYAPPI; QLFNSTWFNSTWSTE; FNSTWFNST; QLFNSTWFNSTWS | |
| | TE; LFNSTWFNS; QLFNSTWFNSTWSTE; STWFNSTWS; QLLSGIVQ | |
| | QQNNLLR; IVQQQNNLL; QLTVWGIKQLQARIL; WGIKQLQAR; QNNL | |
| | LRAIEAQQHLL; LRAIEAQQH; QQHLLQLTVWGIKQL; LLQLTVWGI; Q | |
| | QNNLLRAIEAQQHL; LRAIEAQQH; QQQNNLLRAIEAQQH; LLRAIEA | |
| | QQ; QQQNNLLRAIEAQQH; NNLLRAIEA; QREKRAVGIGALFLG; AVG | |
| | IGALFL; QREKRAVGIGALFLG; RAVGIGALF; QSLKPCVKLTPLCVS; | |
| | CVKLTPLCV; QTHLPTPRGPDRPEG; QTHLPTPRG; QYWSQELKNS | |
| | AVSLL; ELKNSAVSL; QYWSQELKNSAVSLL; WSQELKNSA; RAFVTI | |
| | GKIGNMRQA; FVTIGKIGN; RAIRHIPRRIRQGLE; IRHIPRRIR; RAKW | |
| | NNTLKQIASKL; WNNTLKQIA; RAVGIGALFLGFLGA; VGIGALFLG; R | |
| | CSSNITGLLLTRDG; ITGLLLTRD; RDLLLIVTRIVELLG; LIVTRIVEL; R | |
| | DLLLIVTRIVELLG; LLIVTRIVE; RDLLLIVTRIVELLG; LLLIVTRIV; RDN | |
| | WRSELYKYKVVK; WRSELYKYK; RDRDRSIRLVNGSLA; DRSIRLVN | |
| | G; RDRSIRLVNGSLALI; IRLVNGSLA; REINNYTSLIHSLIE; INNYTSLI | |
| | H; REINNYTSLIHSLIE; YTSLIHSLI; REKRAVGIGALFLGF; VGIGALFL | |
| | G; REQFGNNKTIIFKQS; FGNNKTIIF; RGWEALKYWWNLLQY; LKYW | |
| | WNLLQ; RIKQIINMWQKVGKA; IINMWQKVG; RIKQIINMWQKVGKA; I | |
| | NMWQKVGK; RIQRGPGRAFVTIGK; IQRGPGRAF; RIRIQRGPGRAF | |
| | VTI; IQRGPGRAF; RIRIQRGPGRAFVTI; IRIQRGPGR; RIVELLGRRG | |
| | WEALK; IVELLGRRG; RIVFAVLSIVNRVRQ; FAVLSIVNR; RIVFAVLSI | |
| | VNRVRQ; VLSIVNRVR; RKRIRIQRGPGRAFV; IQRGPGRAF; RKRIRI | |
| | QRGPGRAFV; IRIQRGPGR; RLRDLLLIVTRIVEL; LLIVTRIVE; RLRDL | |
| | LLIVTRIVEL; LLLIVTRIV; RLRDLLLIVTRIVEL; LRDLLLIVT; RLVNGSL | |
| | ALIWDDLR; VNGSLALIW; RPVVSTQLLLNGSLA; VVSTQLLLN; RQG | |
| | YSPLSFQTHLPT; YSPLSFQTH; RQLLSGIVQQQNNLL; LLSGIVQQQ; | |
| | RQLLSGIVQQQNNLL; LSGIVQQQN; RRGWEALKYWWNLLQ; RRG | |
| | WEALKY; RRGWEALKYWWNLLQ; WEALKYWWN; RSELYKYKVVKI | |
| | EPL; LYKYKVVKI; RSELYKYKVVKIEPL; YKYKVVKIE; RSIRLVNGSL | |
| | ALIWD; IRLVNGSLA; RSIRLVNGSLALIWD; LVNGSLALI; RVIEVVQG | |
| | ACRAIRH; VVQGACRAI; RVKEKYQHLWRWGWR; YQHLWRWGW; | |
| | RVRQGYSPLSFQTHL; VRQGYSPLS; RWGTMLLGMLMICSA; LLGM | |
| | LMICS; RWGTMLLGMLMICSA; WGTMLLGML; RWGWRWGTMLLG | |
| | MLM; WGTMLLGML; RWGWRWGTMLLGMLM; WRWGTMLLG; SAV | |
| | SLLNATAIAVAE; LLNATAIAV; SCNTSVITQACPKVS; VITQACPKV; S | |
| | ELYKYKVVKIEPLG; YKVVKIEPL; SFNISTSIRGKVQKE; FNISTSIRG; | |
| | SFQTHLPTPRGPDRP; FQTHLPTPR; SFQTHLPTPRGPDRP; QTHL | |
| | PTPRG; SGIVQQQNNLLRAIE; IVQQQNNLL; SGIVQQQNNLLRAIE; V | |
| | QQQNNLLR; SGKLICTTAVPWNAS; ICTTAVPWN; SGKLICTTAVPW | |
| | NAS; LICTTAVPW; SIRLVNGSLALIWDD; IRLVNGSLA; SIRLVNGSLA | |
| | LIWDD; LVNGSLALI; SIVNRVRQGYSPLSF; IVNRVRQGY; SIVNRVR | |
| | QGYSPLSF; VRQGYSPLS; SKLREQFGNNKTIIF; LREQFGNNK; SKL | |
| | REQFGNNKTIIF; QFGNNKTII; SLAEEEVVIRSVNFT; EEVVIRSVN; S | |
| | LAEEEVVIRSVNFT; EVVIRSVNF; SLALIWDDLRSLCLF; WDDLRSL | |
| | CL; SLCLFSYHRLRDLLL; FSYHRLRDL; SLEQIWNHTTWMEWD; IW | |
| | NHTTWME; SLEQIWNHTTWMEWD; WNHTTWMEW; SLKCTDLKND | |
| | TNTNS; DLKNDTNTN; SLKPCVKLTPLCVSL; VKLTPLCVS; SLLNATA | |
| | IAVAEGTD; LLNATAIAV; SLWDQSLKPCVKLTP; LWDQSLKPC; SLW | |
| | NWFNITNWLWYI; FNITNWLWY; SLWNWFNITNWLWYI; WFNITNW | |
| | LW; SLWNWFNITNWLWYI; WNWFNITNW; SMTLTVQARQLLSGI; LT | |
| | VQARQLL; SMTLTVQARQLLSGI; VQARQLLSG; SNITGLLLTRDGG | |
| | NS; ITGLLLTRD; SPLSFQTHLPTPRGP; FQTHLPTPR; SPLSFQTHLP | |
| | TPRGP; QTHLPTPRG; SQELKNSAVSLLNAT; LKNSAVSLL; SRAKW | |
| | NNTLKQIASK; WNNTLKQIA; SSNITGLLLTRDGGN; ITGLLLTRD; ST | |
| | MGAASMTLTVQAR; MGAASMTLT; STQLFNSTWFNSTWS; FNSTW | |
| | FNST; STQLFNSTWFNSTWS; LFNSTWFNS; STQLLLNGSLAEEEV; | |
| | LLLNGSLAE; STVQCTHGIRPVVST; THGIRPVVS; STWFNSTWSTE | |
| | GSNN; FNSTWSTEG; STWFNSTWSTEGSNN; WFNSTWSTE; STWS | |
| | TEGSNNTEGSD; WSTEGSNNT; SVEINCTRPNNNTRK; INCTRPNN | |
| | N; SVITQACPKVSFEPI; ITQACPKVS; SYHRLRDLLLIVTRI; LRDLLLI | |
| | VT; SYKLTSCNTSVITQA; LTSCNTSVI; TAIAVAEGTDRVIEV; IAVAE | |
| | GTDR; TAVPWNASWSNKSLE; VPWNASWSN; TAVPWNASWSNKS | |
| | LE; WNASWSNKS; TDLKNDTNTNSSSGR; LKNDTNTNS; TDNAKTIIV | |
| | QLNTSV; AKTIIVQLN; TDRVIEVVQGACRAI; EVVQGACRA; TENFN | |
| | MWKNDMVEQM; FNMWKNDMV; TENFNMWKNDMVEQM; MWKND | |
| | MVEQ; TEVHNVWATHACVPT; VHNVWATHA; TFNGTGPCTNVSTV | |
| | Q; FNGTGPCTN; THACVPTDPNPQEVV; VPTDPNPQE; THGIRPVVS | |
| | TQLLLN; IRPVVSTQL; TIIFKQSSGGDPEIV; FKQSSGGDP; TIIVQLN | |
| | TSVEINCT; IVQLNTSVE; TIIVQLNTSVEINCT; VQLNTSVEI; TLFCAS | |
| | DAKAYDTEV; FCASDAKAY; TLKQIASKLREQFGN; LKQIASKLR; TLT | |
| | VQARQLLSGIVQ; LTVQARQLL; TLTVQARQLLSGIVQ; VQARQLLS | |
| | G; TMGAASMTLTVQARQ; MGAASMTLT; TMLLGMLMICSATEK; LLG | |
| | MLMICS; TNWLWYIKLFIMIVG; LWYIKLFIM; TNWLWYIKLFIMIVG; W | |
| | LWYIKLFI; TNWLWYIKLFIMIVG; YIKLFIMIV; TQLFNSTWFNSTWST; | |
| | FNSTWFNST; TQLFNSTWFNSTWST; LFNSTWFNS; TQLFNSTWFN | |
| | STWST; STWFNSTWS; TRIVELLGRRGWEAL; IVELLGRRG; TRIVEL | |
| | LGRRGWEAL; TRIVELLGR; TRKRIRIQRGPGRAF; IRIQRGPGR; TR | |
| | KRIRIQRGPGRAF; RKRIRIQRG; TRPNNNTRKRIRIQR; PNNNTRKRI; | |
| | TSVITQACPKVSFEP; ITQACPKVS; TSYKLTSCNTSVITQ; LTSCNT | |
| | SVI; TTAVPWNASWSNKSL; VPWNASWSN; TTAVPWNASWSNKSL; | |
| | WNASWSNKS; TTLFCASDAKAYDTE; FCASDAKAY; TTSYKLTSCN | |
| | TSVIT; LTSCNTSVI; TTSYKLTSCNTSVIT; YKLTSCNTS; TTTLFCAS | |
| | DAKAYDT; FCASDAKAY; TTWMEWDREINNYTS; MEWDREINN; TV | |
| | QARQLLSGIVQQQ; VQARQLLSG; TVQCTHGIRPVVSTQ; THGIRPV | |
| | VS; TVWGIKQLQARILAV; IKQLQARIL; TVWGIKQLQARILAV; WGIKQ | |
| | LQAR; TVYYGVPVWKEATTT; YYGVPVWKE; TWFNSTWSTEGSNN | |
| | T; FNSTWSTEG; TWMEWDREINNYTSL; MEWDREINN; VAPTKAKR | |
| | RVVQREK; PTKAKRRVV; VAPTKAKRRVVQREK; VAPTKAKRR; VEI | |
| | NCTRPNNNTRKR; TRPNNNTRK; VFAVLSIVNRVRQGY; LSIVNRVR | |
| | Q; VFAVLSIVNRVRQGY; VFAVLSIVN; VFAVLSIVNRVRQGY; VLSIV | |
| | NRVR; VGGLVGLRIVFAVLS; LVGLRIVFA; VGGLVGLRIVFAVLS; VG | |
| | LRIVFAV; VGIGALFLGFLGAAG; IGALFLGFL; VGIGALFLGFLGAAG; | |
| | LFLGFLGAA; VGKAMYAPPISGQIR; YAPPISGQI; VGLRIVFAVLSIVN | |
| | R; IVFAVLSIV; VGLRIVFAVLSIVNR; LRIVFAVLS; VHNVWATHACVP | |
| | TDP; WATHACVPT; VIEVVQGACRAIRHI; VVQGACRAI; VITQACPKV | |
| | SFEPIP; ITQACPKVS; VKEKYQHLWRWGWRW; QHLWRWGWR; VK | |
| | IEPLGVAPTKAKR; IEPLGVAPT; VKIEPLGVAPTKAKR; LGVAPTKAK; | |
| | VKLTPLCVSLKCTDL; LTPLCVSLK; VLSIVNRVRQGYSPL; IVNRVR | |
| | QGY; VNGSLALIWDDLRSL; VNGSLALIW; VNRVRQGYSPLSFQT; V | |
| | RQGYSPLS; VNVTENFNMWKNDMV; NFNMWKNDM; VNVTENFNM | |
| | WKNDMV; TENFNMWKN; VPVWKEATTTLFCAS; WKEATTTLF; VPW | |
| | NASWSNKSLEQI; WNASWSNKS; VQARQLLSGIVQQQN; VQARQLL | |
| | SG; VQCTHGIRPVVSTQL; THGIRPVVS; VQLNTSVEINCTRPN; VQL | |
| | NTSVEI; VQQQNNLLRAIEAQQ; VQQQNNLLR; VQREKRAVGIGALF | |
| | L; VQREKRAVG; VRQGYSPLSFQTHLP; VRQGYSPLS; VSLLNATAIA | |
| | VAEGT; LLNATAIAV; VSTQLLLNGSLAEEE; LLLNGSLAE; VSTVQCT | |
| | HGIRPVVS; VQCTHGIRP; VTENFNMWKNDMVEQ; FNMWKNDMV; | |
| | VTIGKIGNMRQAHCN; IGNMRQAHC; VTRIVELLGRRGWEA; IVELL | |
| | GRRG; VTRIVELLGRRGWEA; TRIVELLGR; VTVYYGVPVWKEATT; | |
| | YYGVPVWKE; VVIRSVNFTDNAKTI; VVIRSVNFT; VVKIEPLGVAPTK | |
| | AK; IEPLGVAPT; VVKIEPLGVAPTKAK; VKIEPLGVA; VVLVNVTENF | |
| | NMWKN; LVNVTENFN; VVSTQLLLNGSLAEE; STQLLLNGS; VWATH | |
| | ACVPTDPNPQ; HACVPTDPN; VWGIKQLQARILAVE; IKQLQARIL; V | |
| | WGIKQLQARILAVE; WGIKQLQAR; VWKEATTTLFCASDA; WKEATT | |
| | TLF; VYYGVPVWKEATTTL; PVWKEATTT; VYYGVPVWKEATTTL; Y | |
| | YGVPVWKE; WASLWNWFNITNWLW; ASLWNWFNI; WASLWNWFN | |
| | ITNWLW; WASLWNWFN; WATHACVPTDPNPQE; HACVPTDPN; WD | |
| | DLRSLCLFSYHRL; LRSLCLFSY; WDREINNYTSLIHSL; INNYTSLIH; | |
| | WEALKYWWNLLQYWS; LKYWWNLLQ; WEALKYWWNLLQYWS; Y | |
| | WWNLLQYW; WFNITNWLWYIKLFI; FNITNWLWY; WFNITNWLWYIK | |
| | LFI; ITNWLWYIK; WFNITNWLWYIKLFI; WFNITNWLW; WFNSTWSTE | |
| | GSNNTE; FNSTWSTEG; WFNSTWSTEGSNNTE; NSTWSTEGS; WF | |
| | NSTWSTEGSNNTE; WSTEGSNNT; WGCSGKLICTTAVPW; WGCS | |
| | GKLIC; WGIKQLQARILAVER; IKQLQARIL; WGTMLLGMLMICSAT; L | |
| | GMLMICSA; WGTMLLGMLMICSAT; LLGMLMICS; WGWRWGTMLL | |
| | GMLMI; WGTMLLGML; WGWRWGTMLLGMLMI; WRWGTMLLG; WK | |
| | EATTTLFCASDAK; WKEATTTLF; WLWYIKLFIMIVGGL; IKLFIMIVG; | |
| | WLWYIKLFIMIVGGL; YIKLFIMIV; WMEWDREINNYTSLI; MEWDREI | |
| | NN; WNASWSNKSLEQIWN; WNASWSNKS; WNHTTWMEWDREINN; | |
| | WMEWDREIN; WNLLQYWSQELKNSA; LQYWSQELK; WNLLQYWS | |
| | QELKNSA; YWSQELKNS; WNNTLKQIASKLREQ; LKQIASKLR; WNW | |
| | FNITNWLWYIKL; FNITNWLWY; WNWFNITNWLWYIKL; ITNWLWYIK; | |
| | WNWFNITNWLWYIKL; WFNITNWLW; WQKVGKAMYAPPISG; GKA | |
| | MYAPPI; WRSELYKYKVVKIEP; WRSELYKYK; WRWGTMLLGMLMI | |
| | CS; WGTMLLGML; WRWGTMLLGMLMICS; WRWGTMLLG; WRWG | |
| | WRWGTMLLGML; WGWRWGTML; WRWGWRWGTMLLGML; WRW | |
| | GTMLLG; WSQELKNSAVSLLNA; LKNSAVSLL; WVTVYYGVPVWKE | |
| | AT; YYGVPVWKE; WWNLLQYWSQELKNS; LLQYWSQEL; WWNLLQ | |
| | YWSQELKNS; LQYWSQELK; WYIKLFIMIVGGLVG; FIMIVGGLV; WYI | |
| | KLFIMIVGGLVG; IKLFIMIVG; YAFFYKLDIIPIDND; YKLDIIPID; YCNS | |
| | TQLFNSTWFNS; TQLFNSTWF; YDTEVHNVWATHACV; VHNVWAT | |
| | HA; YGVPVWKEATTTLFC; WKEATTTLF; YHRLRDLLLIVTRIV; LRDL | |
| | LLIVT; YIKLFIMIVGGLVGL; FIMIVGGLV; YIKLFIMIVGGLVGL; IKLFIM | |
| | IVG; YIKLFIMIVGGLVGL; IMIVGGLVG; YKLTSCNTSVITQAC; LTSCN | |
| | TSVI; YKVVKIEPLGVAPTK; IEPLGVAPT; YKVVKIEPLGVAPTK; VKIE | |
| | PLGVA; YKYKVVKIEPLGVAP; VVKIEPLGV; YKYKVVKIEPLGVAP; Y | |
| | KVVKIEPL; YQHLWRWGWRWGTML; LWRWGWRWG; YQHLWRW | |
| | GWRWGTML; QHLWRWGWR; YQHLWRWGWRWGTML; WRWGW | |
| | RWGT; YSPLSFQTHLPTPRG; FQTHLPTPR; YSPLSFQTHLPTPRG; | |
| | SFQTHLPTP; YWSQELKNSAVSLLN; LKNSAVSLL; YWWNLLQYWS | |
| | QELKN; LQYWSQELK; YWWNLLQYWSQELKN; YWWNLLQYW; YY | |
| | GVPVWKEATTTLF; VWKEATTTL; YYGVPVWKEATTTLF; YYGVPV | |
| | WKE; AAGSTMGAASMTLTV; MGAASMTLT; AASMTLTVQARQLLS; | |
| | LTVQARQLL | |
| NP_057857 | 8-mer | 9109-9568 |
| Nef | GKWSKSSV; KWSKSSVI; SVIGWPTV; VIGWPTVR; WPTVRERM; TV | |
| | RERMRR; RMRRAEPA; AEPAADRV; AASRDLEK; NTAATNAA; ATNA | |
| | ACAW; TNAACAWL; QEEEEVGF; EEEVGFPV; EEVGFPVT; FPVTPQ | |
| | VP; PVTPQVPL; VTPQVPLR; VPLRPMTY; PLRPMTYK; RPMTYKAA; | |
| | PMTYKAAV; TYKAAVDL; AAVDLSHF; AVDLSHFL; LSHFLKEK; FLKE | |
| | KGGL; RRQDILDL; DILDLWIY; ILDLWIYH; DLWIYHTQ; WIYHTQGY; I | |
| | YHTQGYF; YFPDWQNY; FPDWQNYT; NYTPGPGV; YTPGPGVR; TP | |
| | GPGVRY; GPGVRYPL; GVRYPLTF; RYPLTFGW; YPLTFGWC; LTFG | |
| | WCYK; TFGWCYKL; FGWCYKLV; WCYKLVPV; VPVEPDKI; NTSLLH | |
| | PV; SLLHPVSL; LLHPVSLH; HPVSLHGM; HGMDDPER; PEREVLEW; | |
| | REVLEWRF; RFDSRLAF; SRLAFHHV; RLAFHHVA; LAFHHVAR; FHH | |
| | VAREL; RELHPEYF; ELHPEYFK | |
| | 9-mer | |
| | WSKSSVIGW; SSVIGWPTV; SVIGWPTVR; PTVRERMRR; TVRERM | |
| | RRA; RMRRAEPAA; RRAEPAADR; RAEPAADRV; EPAADRVGA; GA | |
| | ASRDLEK; NTAATNAAC; TAATNAACA; AATNAACAW; ATNAACAWL; | |
| | NAACAWLEA; AQEEEEVGF; EEEEVGFPV; VGFPVTPQV; FPVTPQ | |
| | VPL; PVTPQVPLR; TPQVPLRPM; QVPLRPMTY; VPLRPMTYK; PLRP | |
| | MTYKA; RPMTYKAAV; MTYKAAVDL; KAAVDLSHF; AAVDLSHFL; AV | |
| | DLSHFLK; DLSHFLKEK; HFLKEKGGL; KEKGGLEGL; GLEGLIHSQ; R | |
| | QDILDLWI; ILDLWIYHT; LWIYHTQGY; WIYHTQGYF; HTQGYFPDW; | |
| | GYFPDWQNY; FPDWQNYTP; NYTPGPGVR; YTPGPGVRY; VRYPL | |
| | TFGW; YPLTFGWCY; PLTFGWCYK; LTFGWCYKL; KLVPVEPDK; EN | |
| | TSLLHPV; GMDDPEREV; DPEREVLEW; EVLEWRFDS; VLEWRFDS | |
| | R; LEWRFDSRL; WRFDSRLAF; RFDSRLAFH; DSRLAFHHV; RLAFH | |
| | HVAR; AFHHVAREL; VARELHPEY; RELHPEYFK | |
| | 10-mer | |
| | KWSKSSVIGW; KSSVIGWPTV; SSVIGWPTVR; VIGWPTVRER; AEP | |
| | AADRVGA; EPAADRVGAA; NTAATNAACA; TAATNAACAW; WLEAQ | |
| | EEEEV; EAQEEEEVGF; EVGFPVTPQV; FPVTPQVPLR; VTPQVPLR | |
| | PM; PQVPLRPMTY; QVPLRPMTYK; VPLRPMTYKA; PLRPMTYKAA; | |
| | RPMTYKAAVD; MTYKAAVDLS; KAAVDLSHFL; AAVDLSHFLK; GLE | |
| | GLIHSQR; IHSQRRQDIL; RRQDILDLWI; RQDILDLWIY; DILDLWIYHT; | |
| | ILDLWIYHTQ; DLWIYHTQGY; LWIYHTQGYF; FPDWQNYTPG; WQ | |
| | NYTPGPGV; NYTPGPGVRY; TPGPGVRYPL; GPGVRYPLTF; RYPLT | |
| | FGWCY; YPLTFGWCYK; PLTFGWCYKL; LTFGWCYKLV; FGWCYKL | |
| | VPV; KLVPVEPDKI; GENTSLLHPV; NTSLLHPVSL; LLHPVSLHGM; S | |
| | LHGMDDPER; HGMDDPEREV; GMDDPEREVL; PEREVLEWRF; EV | |
| | LEWRFDSR; VLEWRFDSRL; EWRFDSRLAF; WRFDSRLAFH; SRLA | |
| | FHHVAR; LAFHHVAREL; HVARELHPEY | |
| | 11-mer | |
| | SKSSVIGWPTV; KSSVIGWPTVR; SVIGWPTVRER; WPTVRERMRR | |
| | A; RMRRAEPAADR; AEPAADRVGAA; EPAADRVGAAS; RVGAASRD | |
| | LEK; TSSNTAATNAA; NTAATNAACAW; TAATNAACAWL; LEAQEEE | |
| | EVGF; AQEEEEVGFPV; EEVGFPVTPQV; FPVTPQVPLRP; PVTPQV | |
| | PLRPM; TPQVPLRPMTY; QVPLRPMTYKA; VPLRPMTYKAA; PLRPM | |
| | TYKAAV; RPMTYKAAVDL; MTYKAAVDLSH; TYKAAVDLSHF; YKAA | |
| | VDLSHFL; KAAVDLSHFLK; AVDLSHFLKEK; FLKEKGGLEGL; GLIHS | |
| | QRRQDI; RRQDILDLWIY; DILDLWIYHTQ; ILDLWIYHTQG; LDLWIYH | |
| | TQGY; IYHTQGYFPDW; FPDWQNYTPGP; WQNYTPGPGVR; YTPG | |
| | PGVRYPL; VRYPLTFGWCY; RYPLTFGWCYK; YPLTFGWCYKL; PLT | |
| | FGWCYKLV; CYKLVPVEPDK; VPVEPDKIEEA; SLLHPVSLHGM; HG | |
| | MDDPEREVL; GMDDPEREVLE; DPEREVLEWRF; EVLEWRFDSRL; | |
| | VLEWRFDSRLA; LEWRFDSRLAF; WRFDSRLAFHH; RFDSRLAFHH | |
| | V; DSRLAFHHVAR; RLAFHHVAREL; HVARELHPEYF; VARELHPEY | |
| | FK | |
| | 15-mer + 9-mer core | |
| | ADRVGAASRDLEKHG; RVGAASRDL; AEPAADRVGAASRDL; AADR | |
| | VGAAS; AITSSNTAATNAACA; ITSSNTAAT; ASRDLEKHGAITSSN; L | |
| | EKHGAITS; CYKLVPVEPDKIEEA; YKLVPVEPD; DDPEREVLEWRF | |
| | DSR; PEREVLEWR; DLEKHGAITSSNTAA; LEKHGAITS; DPEREVLE | |
| | WRFDSRL; VLEWRFDSR; DSRLAFHHVARELHP; FHHVARELH; DW | |
| | QNYTPGPGVRYPL; YTPGPGVRY; EEVGFPVTPQVPLRP; GFPVTP | |
| | QVP; EEVGFPVTPQVPLRP; VGFPVTPQV; EKHGAITSSNTAATN; IT | |
| | SSNTAAT; ENTSLLHPVSLHGMD; LHPVSLHGM; ENTSLLHPVSLHG | |
| | MD; LLHPVSLHG; EPAADRVGAASRDLE; RVGAASRDL; EREVLEW | |
| | RFDSRLAF; LEWRFDSRL; EREVLEWRFDSRLAF; VLEWRFDSR; ER | |
| | MRRAEPAADRVGA; MRRAEPAAD; EVGFPVTPQVPLRPM; VTPQV | |
| | PLRP; EVLEWRFDSRLAFHH; VLEWRFDSR; EVLEWRFDSRLAFHH; | |
| | WRFDSRLAF; EWRFDSRLAFHHVAR; WRFDSRLAF; FDSRLAFHH | |
| | VARELH; FDSRLAFHH; FGWCYKLVPVEPDKI; YKLVPVEPD; FPDW | |
| | QNYTPGPGVRY; FPDWQNYTP; FPDWQNYTPGPGVRY; WQNYTP | |
| | GPG; FPVTPQVPLRPMTYK; VTPQVPLRP; GAITSSNTAATNAAC; IT | |
| | SSNTAAT; GENTSLLHPVSLHGM; LLHPVSLHG; GFPVTPQVPLRPM | |
| | TY; VTPQVPLRP; GWCYKLVPVEPDKIE; YKLVPVEPD; GYFPDWQN | |
| | YTPGPGV; FPDWQNYTP; GYFPDWQNYTPGPGV; WQNYTPGPG; H | |
| | GAITSSNTAATNAA; ITSSNTAAT; HTQGYFPDWQNYTPG; QGYFPD | |
| | WQN; HTQGYFPDWQNYTPG; YFPDWQNYT; ITSSNTAATNAACAW; | |
| | ITSSNTAAT; IYHTQGYFPDWQNYT; GYFPDWQNY; IYHTQGYFPD | |
| | WQNYT; QGYFPDWQN; KGENTSLLHPVSLHG; NTSLLHPVS; KGEN | |
| | TSLLHPVSLHG; SLLHPVSLH; KHGAITSSNTAATNA; ITSSNTAAT; K | |
| | SSVIGWPTVRERMR; VIGWPTVRE; KWSKSSVIGWPTVRE; KSSVI | |
| | GWPT; KWSKSSVIGWPTVRE; KWSKSSVIG; LAFHHVARELHPEYF; | |
| | FHHVARELH; LEKHGAITSSNTAAT; GAITSSNTA; LEKHGAITSSNTA | |
| | AT; HGAITSSNT; LEWRFDSRLAFHHVA; WRFDSRLAF; LHPVSLHG | |
| | MDDPERE; LHGMDDPER; LHPVSLHGMDDPERE; LHPVSLHGM; LL | |
| | HPVSLHGMDDPER; LHPVSLHGM; LLHPVSLHGMDDPER; LLHPVS | |
| | LHG; LRPMTYKAAVDLSHF; MTYKAAVDL; LTFGWCYKLVPVEPD; G | |
| | WCYKLVPV; MGGKWSKSSVIGWPT; MGGKWSKSS; MTYKAAVDLS | |
| | HFLKE; MTYKAAVDL; NTSLLHPVSLHGMDD; LHPVSLHGM; NTSLL | |
| | HPVSLHGMDD; LLHPVSLHG; NYTPGPGVRYPLTFG; YTPGPGVRY; | |
| | PDWQNYTPGPGVRYP; WQNYTPGPG; PDWQNYTPGPGVRYP; Y | |
| | TPGPGVRY; PEREVLEWRFDSRLA; VLEWRFDSR; PLRPMTYKAAV | |
| | DLSH; MTYKAAVDL; PMTYKAAVDLSHFLK; MTYKAAVDL; PQVPLR | |
| | PMTYKAAVD; LRPMTYKAA; PTVRERMRRAEPAAD; ERMRRAEPA; | |
| | PVTPQVPLRPMTYKA; VPLRPMTYK; PVTPQVPLRPMTYKA; VTPQ | |
| | VPLRP; PAADRVGAASRDLEK; RVGAASRDL; QGYFPDWQNYTPG | |
| | PG; QGYFPDWQN; QGYFPDWQNYTPGPG; YFPDWQNYT; QNYTP | |
| | GPGVRYPLTF; YTPGPGVRY; QVPLRPMTYKAAVDL; LRPMTYKAA; | |
| | RDLEKHGAITSSNTA; LEKHGAITS; RERMRRAEPAADRVG; MRRAE | |
| | PAAD; REVLEWRFDSRLAFH; VLEWRFDSR; REVLEWRFDSRLAFH; | |
| | WRFDSRLAF; RLAFHHVARELHPEY; FHHVARELH; RPMTYKAAVD | |
| | LSHFL; MTYKAAVDL; SKSSVIGWPTVRERM; VIGWPTVRE; SLLHPV | |
| | SLHGMDDPE; LHPVSLHGM; SLLHPVSLHGMDDPE; LLHPVSLHG; S | |
| | RDLEKHGAITSSNT; LEKHGAITS; SRLAFHHVARELHPE; FHHVARE | |
| | LH; SSVIGWPTVRERMRR; VIGWPTVRE; SVIGWPTVRERMRRA; VI | |
| | GWPTVRE; TFGWCYKLVPVEPDK; YKLVPVEPD; TPQVPLRPMTYK | |
| | AAV; LRPMTYKAA; TPQVPLRPMTYKAAV; VPLRPMTYK; TQGYFPD | |
| | WQNYTPGP; QGYFPDWQN; TQGYFPDWQNYTPGP; YFPDWQNYT; | |
| | TSLLHPVSLHGMDDP; LHPVSLHGM; TSLLHPVSLHGMDDP; LLHP | |
| | VSLHG; TVRERMRRAEPAADR; MRRAEPAAD; VGFPVTPQVPLRP | |
| | MT; VTPQVPLRP; VIGWPTVRERMRRAE; VIGWPTVRE; VLEWRFD | |
| | SRLAFHHV; VLEWRFDSR; VLEWRFDSRLAFHHV; WRFDSRLAF; V | |
| | PLRPMTYKAAVDLS; LRPMTYKAA; VRERMRRAEPAADRV; MRRAE | |
| | PAAD; VTPQVPLRPMTYKAA; VPLRPMTYK; VTPQVPLRPMTYKAA; | |
| | VTPQVPLRP; WCYKLVPVEPDKIEE; YKLVPVEPD; WQNYTPGPGV | |
| | RYPLT; YTPGPGVRY; WRFDSRLAFHHVARE; WRFDSRLAF; WSKS | |
| | SVIGWPTVRER; VIGWPTVRE; YFPDWQNYTPGPGVR; WQNYTPG | |
| | PG; YHTQGYFPDWQNYTP; QGYFPDWQN; YHTQGYFPDWQNYTP; | |
| | YFPDWQNYT; YKLVPVEPDKIEEAN; YKLVPVEPD; YTPGPGVRYP | |
| | LTFGW; YTPGPGVRY; AADRVGAASRDLEKH; RVGAASRDL; AASR | |
| | DLEKHGAITSS; LEKHGAITS | |

[0265] In another embodiment the antigenic peptide(s) include one or more of the following peptides IVDCLTEMY (SEQ ID NO 9588), VTDFSVIK (SEQ ID NO 9589), GLIQLVEGV (SEQ ID NO 9590), RIAAWMATY (SEQ ID NO 9591), EYRALQLHL (SEQ ID NO 9592) or any variant or fragment thereof such as antigenic peptides comprising the core sequences listed above or variants thereof.

[0266] The present invention further relates to one or more antigenic peptides such as the antigenic peptides disclosed in this application, wherein the one or more antigenic peptides have one or more amino acid substitutions such as 1, 2, 3, 4, 5, 6, 7, or 8.

[0267] In a preferred embodiment these amino acid substitutions comprise substitution with an “equivalent amino acid residue”. An “equivalent amino acid residue” refers to an amino acid residue capable of replacing another amino acid residue in a polypeptide without substantially altering the structure and/or functionality of the polypeptide. Equivalent amino acids thus have similar properties such as bulkiness of the side-chain, side chain polarity (polar or non-polar), hydrophobicity (hydrophobic or hydrophilic), pH (acidic, neutral or basic) and side chain organization of carbon molecules (aromatic/aliphatic). As such, “equivalent amino acid residues” can be regarded as “conservative amino acid substitutions”.

[0268] The classification of equivalent amino acids refers in one embodiment to the following classes: 1) HRK, 2) DENQ, 3) C, 4) STPAG, 5) MILV and 6) FYW.

[0269] Within the meaning of the term “equivalent amino acid substitution” as applied herein, one amino acid may be substituted for another, in one embodiment, within the groups of amino acids indicated herein below:

Amino acids having polar side chains (Asp, Glu, Lys, Arg, His, Asn, Gln, Ser, Thr, Tyr, and Cys,)
Amino acids having non-polar side chains (Gly, Ala, Val, Leu, Ile, Phe, Trp, Pro, and Met)
Amino acids having aliphatic side chains (Gly, Ala Val, Leu, Ile)
Amino acids having cyclic side chains (Phe, Tyr, Trp, His, Pro)
Amino acids having aromatic side chains (Phe, Tyr, Trp)
Amino acids having acidic side chains (Asp, Glu)
Amino acids having basic side chains (Lys, Arg, His)
Amino acids having amide side chains (Asn, Gln)
Amino acids having hydroxy side chains (Ser, Thr)
Amino acids having sulphor-containing side chains (Cys, Met),
Neutral, weakly hydrophobic amino acids (Pro, Ala, Gly, Ser, Thr)
Hydrophilic, acidic amino acids (Gln, Asn, Glu, Asp), and
Hydrophobic amino acids (Leu, Ile, Val)

[0270] A Venn diagram is another method for grouping of amino acids according to their properties (Livingstone & Barton, CABIOS, 9, 745-756, 1993). In another preferred embodiment one or more amino acids may be substituted with another within the same Venn diagram group.

[0271] The present invention also relates to a group of peptides called nonsense peptides. A nonsense peptide is here to be understood as a peptide that binds the MHC protein efficiently, but that does not support binding of the resultant MHC-peptide complex to the desired TCR. An example nonsense peptide is a peptide with an amino acid sequence different from the linear sequence of any peptide derived from any known protein. When choosing an appropriate nonsense peptide the following points are taken into consideration. The peptide should ideally have appropriate amino acids at relevant positions that can anchor the peptide to the peptide-binding groove of the MHC. The remaining amino acids should ideally be chosen in such a way that possible binding to TCR (through interactions with the peptide or peptide-binding site of MHC) are minimized. The peptide should ideally be soluble in water to make proper folding with MHC alpha chain and β2m possible in aqueous buffer. The length of the peptide should ideally match the type and allele of MHC complex. The final peptide sequence should ideally be taken through a blast search or similar analysis, to ensure that it is not identical with any peptide sequence found in any known naturally occurring proteins. Nonsense peptides may be used as negative control peptides in experiments with MHC-peptide molecules or MHC multimers.

### Attachment of Biologically Active Molecules to Multimerisation Domain(s)

[0272] Pharmamers comprises various molecules covalently or non-covalently attached to multimerisation domains. Such molecules include: biological active molecules, molecules having adjuvant effects; molecules being immune targets e.g. antigens or other molecules as described elsewhere herein. In the following principles for attachment of biologically active molecules to multimerisation domains are described, but same principles may be applied to attachment of adjuvant molecules, immune target molecules or any other molecules to multimerisation domains.

[0273] In brief, attachment can be done by chemical reactions between reactive groups on the biologically active molecule, e.g. amino groups on the protein surface and reactive groups of the multimerisation domain, e.g. vinyl sulfone functionalities on a dextran polymer and/or between reactive groups on the biologically active molecule. Alternatively, attachment is done by non-covalent interaction between part of the multimerisation domain and part of the biological active molecule. In both covalent and non-covalent attachment of the biologically molecule to the multimerisation domain a linker molecule can connect the two. The linker molecule can be covalent or non-covalent attached to both molecules. Biological active molecules can be attached repetitively aiding to recognition by and stimulation of the innate immune system via Toll or other receptors.

[0274] The coupling of one or more multimerization domains and biologically active molecules can involve the association of an entity X (attached to or part of the one or more multimerization domain) and an entity Y (attached to or part of biologically active molecule). Thus, the linker that connects the one or more multimerization domain(s) and the biologically active molecule can comprise an XY portion.

[0275] The XY linkage can be covalent, in which case X and Y are reactive groups. In this case, X can be a nucleophilic group (such as —NH₂, —OH, —SH, —NH—NH₂), and Y an electrophilic group (such as CHO, COOH, CO) that react to form a covalent bond XY; or Y can be a nucleophilic group and X an electrophilic group that react to form a covalent bond XY. Other possibilities exist, e.g. either of the reactive groups can be a radical, capable of reacting with the other reactive group. A number of reactive groups X and Y, and the bonds that are formed upon reaction of X and Y, are shown in the table below.

[0276] X and Y can be reactive groups naturally comprised within the multimerization domain(s) and/or the biologically active molecule, or they can be artificially added reactive groups. Thus, linkers comprising reactive groups can be linked to either of the multimerization domain(s) and the biologically active molecule; subsequently the introduced reactive group(s) can be used to covalently link the one or more multimerization domain(s) and the biologically active molecule.

[0277] Example natural reactive groups of biologically active molecules include amino acid side chains comprising —NH₂, —OH, —SH, and —NH—. Example natural reactive groups of multimerization domains include hydroxyls of polysaccharides such as dextrans, but also include amino acid side chains comprising —NH₂, —OH, —SH, and —NH— of polypeptides, when the polypeptide is used as one or more multimerization domain(s). In some pharmamers, one of the biologically active is linked by a protein fusion to the one or more multimerization domain(s). Thus, during the translation of the fusion protein, an acyl group (reactive group X or Y) and an amino group (reactive group Y or X) react to form an amide bond. Example is where the biologically active polypeptide chains are fused to one alpha-helic of a coiled-coil structure and where the other alpha helic of a coiled-coil structure is attached to the multimerisation domain. Biologically active proteins are then attached to the multimerisation domain through interaction of the two alpha-helices. Example coiled-coil structure include leucine zipper, fos-jun or other coiled coil structures as described elsewhere herein. Example non-native reactive groups include reactive groups that are attached to the one or more multimerization domain(s) or biologically active protein, through association of a linker molecule comprising the reactive group. The activation of dextran by reaction of the dextran hydroxyls with divinyl sulfone, introduces a reactive vinyl group that can react with e.g. amines of biologically active proteins, to form an amine that now links the one or more multimerization domain(s) (the dextran polymer) and the biologically active protein. Reactive vinyl groups may also react with thiols of the biologically active protein. An alternative activation of the dextran multimerization domain(s) involves a multistep reaction that results in the decoration of the dextran with maleimide groups, as described in the patent Siiman et al. U.S. Pat. No. 6,387,622. In this approach, the amino groups of biologically active proteins are converted to —SH groups, capable of reacting with the maleimide groups of the activated dextran. Alternatively —SH groups of natural occurring Cysteine or artificial incorporated Cysteine can react with the maleimide. Thus, in the latter examples, both the reactive group of the multimerization domain(s) (the maleimide) and the reactive group of the biologically active protein (the thiol) are artificially introduced.

[0278] Sometimes activating reagents are used in order to make the reactive groups more reactive. For example, acids such as glutamate or aspartate can be converted to activated esters by addition of e.g. carbodiimide and NHS or nitrophenol, or by converting the acid moiety to a tosyl-activated ester. The activated ester reacts efficiently with a nucleophile such as —NH₂, —SH, —OH, etc.

[0279] For the purpose of this invention, the multimerization domain(s) (including small organic scaffold molecules, proteins, protein complexes, polymers, beads, liposomes, micelles, cells) that form a covalent bond with the biologically active proteins can be divided into separate groups, depending on the nature of the reactive group that the one or more multimerization domain(s) contains. One group comprise multimerization domain(s) that carry nucleophilic groups (e.g. —NH₂, —OH, —SH, —CN, —NH—NH₂), exemplified by polysaccharides, polypeptides comprising e.g. lysine, serine, and cysteine; another group of multimerization domain(s) carry electrophilic groups (e.g. —COOH, —CHO, —CO, NHS-ester, tosyl-activated ester, and other activated esters, acid-anhydrides), exemplified by polypeptides comprising e.g. glutamate and aspartate, or vinyl sulfone activated dextran; yet another group of multimerization domains carry radicals or conjugated double bonds.

[0280] The one or more multimerization domain(s) appropriate for this invention can be those that comprise any of the reactive groups shown in FIG. 10 or that can react with other reactive groups to form the bonds shown in the table herein below.

[0281] The biologically active proteins can be divided in a similar way, according to the nature of their reactive groups.

[0282] In another preferred embodiment the linker can be selected from, but is not limited to, the group consisting of a disulfide-bridge connecting amino acids, heparin or heparan sulfate-derived oligosaccharides (glycosoaminoglycans), bifunctional or chemical cross-linkers, peptide linker, polypeptide linker, flexible linker, synthetic linker, hydrazones, thioethers, esters, disulfides and peptide-containing linkers.

[0283] Examples of linkers include but are not limited to a disulfide-bridge connecting amino acids from both polypeptides; heparin or heparan sulfate-derived oligosaccharides (glycosoaminoglycans) connecting both polypeptides; bifunctional or chemical cross-linkers; and a peptide or polypeptide linker. The unimolecular protein can also be a chimera or fusion polypeptide.

[0284] The peptide linker sequence is typically flexibly disposed in the fusion protein so as to position the V-alpha and V-beta chains in a configuration which optimally binds an antigen. The peptide linker preferably predominantly comprises amino acids with small side chains, such as glycine, alanine and serine, to provide flexibility. Preferably, about 80 or 90 percent or greater of the linker sequence comprises glycine, alanine or serine residues, particularly glycine and serine residues. Preferably, the linker sequence does not contain any proline residues, which could inhibit flexibility. The linker sequence is suitably attached to the C-terminus of the V-alpha chain and the N-terminus of the V-beta chain of a fusion protein.

[0285] Crosslinkers can be either homobifunctional or heterobifunctional. Homobifunctional crosslinkers have two identical reactive groups and often are used in one-step reaction procedures to crosslink proteins to each other or to stabilize quaternary structure. Heterobifunctional crosslinkers possess two different reactive groups that allow for sequential (two-stage) conjugations, helping to minimize undesirable polymerization or self-conjugation. Crosslinkers that are amine-reactive at one end and sulfhydryl-reactive at the other end are especially useful in this regard.

[0286] The most widely-used heterobifunctional crosslinkers are those having an amine-reactive succinimidyl ester (i.e., NHS-ester) at one end and a sulfhydrylreactive group on the other end. The sulfhydryl-reactive groups are usually maleimides, pyridyl disulfides and haloacetyls. The NHS-ester reactivity is less stable in aqueous solution and is usually reacted first in sequential crosslinking procedures. NHS-esters react with amines to form amide bonds. Carbodiimides are zero-length crosslinkers and effect direct coupling between carboxylates (—COOH) and primary amines (—NH₂).

[0287] Other heterobifunctional reagents have one reactive group that is photoreactive rather than thermoreactive. This reactivity allows for specific attachment of the labile thermoreactive group first; subsequently, conjugation to any adjacent N—H or C—H sites can be initiated through the photoreactive group by activation with UV light. Crosslinkers preferably comprise at least two reactive groups. Functional groups that can be targeted for crosslinking include primary amines, sulfhydryls, carbonyls, carbohydrates and carboxylic acids (cf. the Table herein below). Coupling also can be nonselective using a photoreactive phenyl azide crosslinker.

[0288] Reactive Crosslinker Groups and their Functional Group Targets

| Reactive Group | Functional Group |
|---|---|
| Aryl Azide | Non-selective (or primary amine) |
| Carbodiimide | Amine/Carboxyl |
| Hydrazide | Carbohydrate (oxidized) |
| Hydroxymethyl Phosphine | Amine |
| Imidoester | Amine |
| Isocyanate | Hydroxyl (non-aqueous) |
| Maleimide | Sulfhydryl |
| NHS-ester | Amine |
| PFP-ester | Amine |
| Psoralen | Thymine (photoreactive intercalator) |
| Pyridyl Disulfide | Sulfhydryl |
| Vinyl Sulfone | Sulfhydryl, amine, hydroxyl |

[0289] The linker that connects the one or more multimerization domain(s) and the biologically active protein can comprise an XY portion. Above different kinds of covalent linkages XY were described. However, the XY linkage can also be non-covalent.

[0290] Non-covalent XY linkages can comprise natural dimerization pairs such as antigen-antibody pairs, DNA-DNA interactions, or can include natural interactions, for example between biotin and streptavidin. Likewise, the interaction of biologically active proteins, including their transmembrane portion with the cell membrane of for example dendritic cells, is an example of a non-covalent XY interaction.

[0291] Artificial XY examples include XY pairs such as His₆ tag (X) interacting with Ni-NTA (Y) and PNA-PNA,

[0292] Examples of dimerization- and multimerization domains, appropriate for use as XY non-covalent linkers between the multimerization domain(s) and the biologically active protein, can be found elsewhere in this application.

[0293] The abovementioned dimerization- and multimerization domains represent specific binding interactions. Another type of non-covalent interactions involves the non-specific adsorption of e.g. proteins onto surfaces. As an example, the non-covalent adsorption of proteins onto glass beads represents this class of XY interactions.

[0294] A preferred embodiment involving non-covalent interactions between X and Y are represented by the pentamer structure described in US patent 2004209295.

[0295] Another preferred embodiment involves the use of antibodies, with affinity for a non-bifunctional part of a biologically active protein. Thus, an anti-biomolecule antibody, with its two binding site, will bind two biologically active proteins and in this way generate a bivalent pharmamer. In addition, the antibody in certain instances can stabilize the pharmamer structure through the binding interactions.

[0296] The antibodies mentioned above can be selected from, but is not limited to, the group consisting of polyclonal antibody, monoclonal antibody, IgA, IgG, IgM, IgD, IgE, IgG1, IgG2, IgG3, IgG4, IgA1, IgA2, IgM1, IgM2, humanized antibody, humanized monoclonal antibody, Chimeric antibody, mouse antibody, rat antibody, rabbit antibody, human antibody, camel antibody, sheep antibody, engineered human antibody, epitope-focused antibody, agonist antibody, antagonist antibody, neutralizing antibody, naturally-occurring antibody, isolated antibody, monovalent antibody, bispecific antibody, trispecific antibody, multispecific antibody, Heteroconjugate antibody, immunoconjugates, immunoliposomes, labeled antibody, antibody fragment, domain antibody, nanobody, minibody, maxibody, diabody, fusion antibody.

[0297] Another preferred embodiment involves use of Streptavidin or Avidin binding biotin on biotinylated biologically active proteins. Said proteins can be biotinylated enzymatically e.g. using a biotinylation tag recognised by BirA enzyme or they can be chemically biotinylated e.g. using Sulfo-NHS esters of biotin reacting with amino groups or maleimide activated biotin reacting with —SH groups.

[0298] The Streptavidin or avidin may further be conjugated to a polymer e.g. dextran as described by Winther et al. in patent WO 02/072631.

[0299] Also included in the present invention is genetically or chemically modified Streptavidin/Avidin binding natural biotin and/or chemically or genetically modified biotin; and chemically or genetically modified biotin binding natural Streptavidin/Avidin or chemically or genetically Streptavidin/Avidin.

[0300] In the present invention another preferred embodiment involving non-covalent interactions between X and Y are use of dimer coiled-coil structures, where one half the coiled structure are attached to the biologically active protein, e.g. as a fusion protein and the other half is attached to the multimerization domain. Example coiled-coil structures include but are not limited to leucine zippers like Fos-Jun, GCN4 leucine zipper, Fos-Jun like leucine zippers, heterodimeric coiled coil structures consisting of a basic peptide and an acidic peptide, heterodimeric coiled coil structures consisting of a basic peptide and an acidic peptide where Cystine are added to the C-termini of the acid and base peptides either directly or through a linker e.g. Gly-Gly, other heterodimeric coiled-coil structures or homodimeric structures.

### Generation of Pharmamers

[0301] Different approaches to the generation of various types of pharmamers can be applied. In brief, pharmamers can be generated by using molecules purified from natural sources, chemically synthesized or produced by recombinant DNA technology. Use of the latter technology allows for modifications of the natural protein/peptide, most commonly used is fragments that retain special interesting structures or biological function. It involves, first cloning of the genes of interest or modified versions hereof, then expression in a suitable host expression system, and purification of the individual protein components representing antigens, biologically or immunological active proteins, and then combining these components in appropriate numbers and ratios by linking them by covalent or non-covalent bonds to a multimerization domain

### Size of Pharmamers

[0302] In one preferred embodiment the pharmamer is between 50,000 Da and 5,000,000 Da, such as from 50,000 Da to 4,000,000 Da; such as from 50,000 Da to 3,000,000 Da; such as from 50,000 Da to 2,000,000; such as from 50,000 Da and 1,000,000 Da, such as from 50,000 Da to 980,000; for example from 50,000 Da to 960,000; such as from 50,000 Da to 940,000; for example from 50,000 Da to 920,000; such as from 50,000 Da to 900,000; for example from 50,000 Da to 880,000; such as from 50,000 Da to 860,000; for example from 50,000 Da to 840,000; such as from 50,000 Da to 820,000; for example from 50,000 Da to 800,000; such as from 50,000 Da to 780,000; for example from 50,000 Da to 760,000; such as from 50,000 Da to 740,000; for example from 50,000 Da to 720,000; such as from 50,000 Da to 700,000; for example from 50,000 Da to 680,000; such as from 50,000 Da to 660,000; for example from 50,000 Da to 640,000; such as from 50,000 Da to 620,000; for example from 50,000 Da to 600,000; such as from 50,000 Da to 580,000; for example from 50,000 Da to 560,000; such as from 50,000 Da to 540,000; for example from 50,000 Da to 520,000; such as from 50,000 Da to 500,000; for example from 50,000 Da to 480,000; such as from 50,000 Da to 460,000; for example from 50,000 Da to 440,000; such as from 50,000 Da to 420,000; for example from 50,000 Da to 400,000; such as from 50,000 Da to 380,000; for example from 50,000 Da to 360,000; such as from 50,000 Da to 340,000; for example from 50,000 Da to 320,000; such as from 50,000 Da to 300,000; for example from 50,000 Da to 280,000; such as from 50,000 Da to 260,000; for example from 50,000 Da to 240,000; such as from 50,000 Da to 220,000; for example from 50,000 Da to 200,000; such as from 50,000 Da to 180,000; for example from 50,000 Da to 160,000; such as from 50,000 Da to 140,000; for example from 50,000 Da to 120,000; such as from 50,000 Da to 100,000; for example from 50,000 Da to 80,000; such as from 50,000 Da to 60,000; such as from 100,000 Da to 980,000; for example from 100,000 Da to 960,000; such as from 100,000 Da to 940,000; for example from 100,000 Da to 920,000; such as from 100,000 Da to 900,000; for example from 100,000 Da to 880,000; such as from 100,000 Da to 860,000; for example from 100,000 Da to 840,000; such as from 100,000 Da to 820,000; for example from 100,000 Da to 800,000; such as from 100,000 Da to 780,000; for example from 100,000 Da to 760,000; such as from 100,000 Da to 740,000; for example from 100,000 Da to 720,000; such as from 100,000 Da to 700,000; for example from 100,000 Da to 680,000; such as from 100,000 Da to 660,000; for example from 100,000 Da to 640,000; such as from 100,000 Da to 620,000; for example from 100,000 Da to 600,000; such as from 100,000 Da to 580,000; for example from 100,000 Da to 560,000; such as from 100,000 Da to 540,000; for example from 100,000 Da to 520,000; such as from 100,000 Da to 500,000; for example from 100,000 Da to 480,000; such as from 100,000 Da to 460,000; for example from 100,000 Da to 440,000; such as from 100,000 Da to 420,000; for example from 100,000 Da to 400,000; such as from 100,000 Da to 380,000; for example from 100,000 Da to 360,000; such as from 100,000 Da to 340,000; for example from 100,000 Da to 320,000; such as from 100,000 Da to 300,000; for example from 100,000 Da to 280,000; such as from 100,000 Da to 260,000; for example from 100,000 Da to 240,000; such as from 100,000 Da to 220,000; for example from 100,000 Da to 200,000; such as from 100,000 Da to 180,000; for example from 100,000 Da to 160,000; such as from 100,000 Da to 140,000; for example from 100,000 Da to 120,000; such as from 150,000 Da to 980,000; for example from 150,000 Da to 960,000; such as from 150,000 Da to 940,000; for example from 150,000 Da to 920,000; such as from 150,000 Da to 900,000; for example from 150,000 Da to 880,000; such as from 150,000 Da to 860,000; for example from 150,000 Da to 840,000; such as from 150,000 Da to 820,000; for example from 150,000 Da to 800,000; such as from 150,000 Da to 780,000; for example from 150,000 Da to 760,000; such as from 150,000 Da to 740,000; for example from 150,000 Da to 720,000; such as from 150,000 Da to 700,000; for example from 150,000 Da to 680,000; such as from 150,000 Da to 660,000; for example from 150,000 Da to 640,000; such as from 150,000 Da to 620,000; for example from 150,000 Da to 600,000; such as from 150,000 Da to 580,000; for example from 150,000 Da to 560,000; such as from 150,000 Da to 540,000; for example from 150,000 Da to 520,000; such as from 150,000 Da to 500,000; for example from 150,000 Da to 480,000; such as from 150,000 Da to 460,000; for example from 150,000 Da to 440,000; such as from 150,000 Da to 420,000; for example from 150,000 Da to 400,000; such as from 150,000 Da to 380,000; for example from 150,000 Da to 360,000; such as from 150,000 Da to 340,000; for example from 150,000 Da to 320,000; such as from 150,000 Da to 300,000; for example from 150,000 Da to 280,000; such as from 150,000 Da to 260,000; for example from 150,000 Da to 240,000; such as from 150,000 Da to 220,000; for example from 150,000 Da to 200,000; such as from 150,000 Da to 180,000; for example from 150,000 Da to 160,000.

### Use of Pharmamers

[0303] Pharmamers of the present invention can be used both as preventive vaccines and therapeutic vaccines e.g. therapeutic cancer vaccines and therapeutic anti-viral vaccines. They are a powerful tool in various in vivo and ex vivo therapeutic vaccine applications as will be apparent from the following.

[0304] The present invention is also based on the recognition that it is possible to design a poly-ligand pharmamer so as to (I) target specific MHC recognising cells, and (II) induce a response as desired, in specific target MHC recognising cells by addressing receptors on such cells. It was further recognised that with such design of MHC molecule/peptide complexes with a given specificity, it is possible to “add” other stimuli to the therapeutic composition by incorporating other molecules, which will affect the activity of the MHC recognising cells. Thus, it is possible to modulate the activity of specifically targeted MHC recognising cell clones, while leaving other MHC recognising cell clones unaffected. Thereby the immune response can be directed aiding the action of the vaccine.

[0305] Furthermore, it is also possible to specifically modulate the activity of more than one MHC recognising cell clone by choosing the before-mentioned other molecules appropriately. The inventions is further based on the recognition that it is possible to obtain specific MHC recognising cells using the pharmamers described herein, to modulate such ex vivo, whereby such cells can be used for in vivo vaccination.

[0306] By analogy it is possible to direct the efforts of specific pharmamers to other specialized immune cells by using pharmamers that contains molecules that make one of an interacting pair, such as, anti-X antibody-antigen X, X being any membrane bound protein specifying a single or multiple cell types; receptor ligands-membrane bound receptors, i.e. IL-2-IL2 receptor, FasL-FasR.

[0307] Accordingly, the present invention provides for methods of up-regulating, down-regulating, modulate, restoring, enhancing, and/or stimulate the immune system, as well as methods of inducing anergy of cells. This can in accordance with the present invention in general be accomplished in two ways, namely in vivo or ex vivo. By “in vivo” is meant that an effective amount of an active substance or ingredient is administered to a subject by any suitable route, the active substance or ingredient exerting its effect in the subject. By “ex vivo” (can also be termed “in vitro”) is meant that cells withdrawn from a subject are in some way affected outside the subject, and then re-introduced to the subject, thereby achieving a desired response.

[0308] It is to be understood that the therapeutic compositions of the present invention can comprise one or more pharmamers as defined above. The biologically or immunologically active molecules of each pharmamer can be the same or different.

[0309] In particular, the inclusion of biologically active molecules can be important to initiate a response as desired. As mentioned above, the immune system is dependent on several signalling pathways, and thus inclusion of biologically active molecules, either as part of pharmamer or alone, can be an excellent way to control or guide the immune system.

[0310] Thus, the present invention relates generally to the pharmamers per se as defined above for use as therapeutic and/or preventive vaccines or constituents in vaccines.

[0311] The vaccines can suitably comprise one or more adjuvants and/or excipients as described in the foregoing. If more adjuvants are included they may be combined together with a single antigen or all antigens present in the vaccine, or each adjuvant may be combined with one particular antigen.

[0312] As used herein, the term “adjuvant” refers to an immunological adjuvant. By this is meant a compound that is able to enhance or facilitate the immune system's response to the ingredient in question, thereby inducing an immune response or series of immune responses in the subject. The adjuvant can facilitate the effect of the therapeutic composition by forming depots (prolonging the half-life of the ingredient), provide additional T-cell help and stimulate cytokine production. Facilitation of antigen survival and unspecific stimulation by adjuvants may, in some cases, be required if the antigenic molecule epitopes or functional molecules of the pharmamer are only weakly antigenic or only exerts weak to moderate interactions with compounds, molecules, or cells of the immune system.

[0313] Included in the term “immune response” is specific humoral, i.e. antibody, as well as cellular immune responses, the antibodies being serologic as well as secretory and pertaining to the subclasses IgM, IgD, IgG, IgA and IgE as well as all isotypes, allotypes, and subclasses thereof. The term is further intended to include other serum or tissue components. The cellular response includes Type-1 and Type-2 T-helper lymphocytes, T-17 regulatory T cells, cytotoxic T-cells as well NK cells. Also included herein is the various responses belonging to the innate immune response.

[0314] The therapeutic compositions of the invention can suitably be applied in the treatment, prevention, stabilisation, or alleviation of various diseases.

[0315] Diseases of relevance are those such as, diseases of inflammatory, auto-immune, allergic, viral, cancerous, infectious, allo- or xenogene (graft versus host and host versus graft) origin. In particular, the disease can be a chronic inflammatory bowel disease such as Crohn's disease or ulcerative colitis, sclerosis, type I diabetes, rheumatoid arthritis, psoriasis, atopic dermatitis, asthma, malignant melanoma, renal carcinoma, breast cancer, lung cancer, cancer of the uterus, prostatic cancer, brain cancer, head and neck cancer, leukaemia, cutaneous lymphoma, hepatic carcinoma, colorectal cancer, bladder cancer, rejection-related disease, Graft-versus-host-related disease, or a viral disease associated with hepatitis, AIDS, measles, pox chicken pox, rubella or herpes.

[0316] In a preferred embodiment of the invention, the clinical condition is a cancer. The term “cancer” as used herein is meant to encompass any cancer, neoplastic and preneoplastic disease. Said cancer may for example be selected from the group consisting of colon carcinoma, breast cancer, pancreatic cancer, ovarian cancer, prostate cancer, fibrosarcoma, myxosarcoma, liposarcoma, chondrosarcoma, osteogenic sarcoma, chordoma, angiosarcoma, endotheliosarcoma, lymphangeosarcoma, lymphangeoendothelia sarcoma, synovioma, mesothelioma, Ewing's sarcoma, leiomyosarcoma, rhabdomyosarcoma, squamous cell carcinoma, basal cell carcinoma, adenocarcinoma, sweat gland carcinoma, sebaceous gland carcinoma, papillary carcinoma, papillary adenocarcinomas, cystandeocarcinoma, medullary carcinoma, bronchogenic carcinoma, renal cell carcinoma, hepatoma, bile duct carcinoma, choriocarcinoma, seminoma, embryonal carcinoma, Wilms' tumor, cervical cancer, testicular tumor, lung carcinoma, small cell lung carcinoma, bladder carcinoma, epithelial carcinoma, glioblastomas, neuronomas, craniopharingiomas, schwannomas, glioma, astrocytoma, medulloblastoma, craniopharyngioma, ependymoma, pinealoma, hemangioblastoma, acoustic neuroama, oligodendroglioma, meningioma, melanoma, neuroblastoma, retinoblastoma, leukemias and lymphomas, acute lymphocytic leukemia and acute myelocytic polycythemia vera, multiple myeloma, Waldenstrom's macroglobulinemia, and heavy chain disease, acute nonlymphocytic leukemias, chronic lymphocytic leukemia, chronic myelogenous leukemia, Hodgkin's Disease, non-Hodgkin's lymphomas, rectum cancer, urinary cancers, uterine cancers, oral cancers, skin cancers, stomach cancer, brain tumors, liver cancer, laryngeal cancer, esophageal cancer, mammary tumors, childhood-null acute lymphoid leukemia (ALL), thymic ALL, B-cell ALL, acute myeloid leukemia, myelomonocytoid leukemia, acute megakaryocytoid leukemia, Burkitt's lymphoma, acute myeloid leukemia, chronic myeloid leukemia, and T cell leukemia, small and large non-small cell lung carcinoma, acute granulocytic leukemia, germ cell tumors, endometrial cancer, gastric cancer, cancer of the head and neck, chronic lymphoid leukemia, hairy cell leukemia and thyroid cancer.

[0317] More specifically, the disease can be of inflammatory/auto-immune origin, including asthma, hypersensitivity pneumonitis, interstitial lung disease, sarcoidosis, idiopathic pulmonary fibrosis, interstitial lung disease associated with Crohn s Disease or ulcerative colitis or Whipple's disease, interstitial lung disease associated with Wegeners granulomatosis or hypersensitivity vasculitis, vasculitis syndromes, Hennoch-Schonleins purpura, Goodpastures syndrome, Wegeners granulomatosis, renal diseases such as antibody mediated glomerulopathia as in acute glomerulonephritis, nephritis associated with systemic lupus erythematosus, nephritis associated with other systemic diseases such as Wegeners granulomatosis and Goodpastures syndrome and mixed connective tissue disease, chronic interstitial nephritis, chronic glomerulonephritis, gastrointestinal diseases such as Crohn s Disease, Ulcerative colitis, coeliac disease, Whipple's disease, collagenous colitis, eosinophilic colitis, lymphatic colitis, hepatobiliary diseases such as auto-immune hepatitis, alcohol induced hepatitis, periportal fibrosis, primary biliary cirrhosis, sclerosing cholangitis, disorders of the central or peripheral nervous system such as demyelinating disease as multiple sclerosis, acute disseminated encephalomyelitis, sub-acute sclerosing panencephalitis, skin disease such as psoriasis, atopic dermatitis, eczema, allergic skin disease, progressive systemic sclerosis (scleroderma), exfoliating dermatitis, pemphigus vulgaris, joint diseases such as rheumatoid arthritis, ankylosing spondylitis, arthritis associated with psoriasis or inflammatory bowel disease, muscoloskelletal diseases such as myasthenia gravis, polymyositis, endocrine diseases such as insulin dependent diabetes mellitus, auto-immune thyroiditis (Hashimoto), thyreotoxicosis, Graves, diseases of the hematopoetic system such as auto-immune anaemia, auto-immune thrombocytopenia, cardiovascular diseases such as cardiomyopathia, vasculitis, cardiovascular disease associated with systemic diseases as systemic lupus erythematosus, polyarthritis nodosa, rheumatoid arthritis, scleroderma, sarcoidosis, diseases of cancerous origin, including malignant melanoma, Sezary's syndrome, cutaneous T-cell lymphoma, renal cell carcinoma, colorectal cancer, breast cancer, ovarian cancer, cancer of the uterus, prostatic cancer, hepatic carcinoma, lung cancer, and sarcoma, diseases, disorders or conditions of allergic origin.

[0318] In one embodiment the invention relates to treatment of one or more autoimmune diseases. Autoimmune diseases may be loosely grouped into those primarily restricted to specific organs or tissues and those that affect the entire body. Examples of organ-specific disorders (with the organ affected) include multiple sclerosis (myelin coating on nerve processes), type I diabetes mellitus (pancreas), Hashimotos thyroiditis (thyroid gland), pernicious anemia (stomach), Addison's disease (adrenal glands), myasthenia gravis (acetylcholine receptors at neuromuscular junction), rheumatoid arthritis (joint lining), uveitis (eye), psoriasis (skin), Guillain-Barre Syndrome (nerve cells) and Grave's disease (thyroid). Systemic autoimmune diseases include systemic lupus erythematosus and dermatomyositis.

[0319] In another embodiment the invention relates to treatment of one or more hypersensitivity disorders. Examples of hypersensitivity disorders include asthma, eczema, atopical dermatitis, contact dermatitis, other eczematous dermatitides, seborrheic dermatitis, rhinitis, Lichen planus, Pemplugus, bullous Pemphigoid, Epidermolysis bullosa, uritcaris, angioedemas, vasculitides, erythemas, cutaneous eosinophilias, Alopecia greata, atherosclerosis, primary biliary cirrhosis and nephrotic syndrome. Related diseases include intestinal inflammations, such as Coeliac disease, proctitis, eosinophilia gastroenteritis, mastocytosis, inflammatory bowel disease, Chrohn's disease and ulcerative colitis, as well as food-related allergies.

[0320] The most common allergens, to which allergic reactions occur, include. inhalation allergens originating i. a. from trees, grasses, herbs, fungi, house dust mites, storage mites, cockroaches and animal hair, feathers, and dandruff. Important pollen allergens from trees, grasses and herbs are such originating from the taxonomic orders of Fagales, Oleales and Pinales including i. a. birch (Betula), alder (Alnus), hazel (Corylus), hornbeam (Carpinus) and olive (Olea), the order of Poales including i. a. grasses of the genera Lolium, Phleum, Poa, Cynodon, Dactylis and Secale, the orders of Astrales and Urticales including i. a. herbs of the genera Ambrosia and Artemisia. Important inhalation allergens from fungi are i. a. such originating from the genera Alternaria and Cladosporium. Other important inhalation allergens are those from house dust mites of the genus Dermatophagoides, storage mites from the genus Lepidoglyphys destructor, those from cockroaches and those from mammals such as cat, dog, horse, cow, and bird. Also, allergic reactions towards stinging or biting insects such as those from the taxonomic order of Hymenoptera including bees, wasps, and ants are commonly observed. Specific allergen components are known to the person skilled in the art and include e.g. Bet v 1 (B. verrucosa, birch), Aln g 1 (Alnus glutinosa, alder), Cor a 1 (Corylus avelana, hazel) and Car b 1 (Carpinus betulus, hornbeam) of the Fagales order. Others are Cry j 1 (Pinales), Amb a 1 and 2, Art v 1 (Asterales), Par j 1 (Urticales), Ole e 1 (Oleaves), Ave e 1, Cyn d 1, Dac g 1, Fes p 1, Hol 1 1, Lol p 1 and 5, Pas n 1, Phl p 1 and 5, Poa p 1, 2 and 5, Sec c 1 and 5, and Sor h 1 (various grass pollens), Alt a 1 and Cla h 1 (fungi), Der f 1 and 2, Der p 1 and 2 (house dust mites, D. farinae and D. pteronyssinus, respectively), Lep d 1, Bla g 1 and 2, Per a 1 (cockroaches, Blatella germanica and Periplaneta americana, respectively), Fel d 1 (cat), Can f 1 (dog), Equ c 1, 2 and 3 (horse), Apis m 1 and 2 (honeybee), Ves g 1, 2 and 5, Pol a 1, 2 and 5 (all wasps) and Sol i 1, 2, 3 and 4 (fire ant), to mention the most common.

### Compositions

[0321] The therapeutic compositions of the invention can be formulated in any suitable way, i. a. depending on the route of administration, and the amount of active ingredient to be administered. In particular, the therapeutic compositions of the invention can be formulated for parenteral administration, including intravenous, intramuscular, intraarticular, subcutaneous, intradermal, epicutantous/transdermal, and intra-peritoneal administration, for infusion, for oral administration, for nasal administration, for rectal administration, for vaginal administration, or for topic administration.

[0322] The pharmamer can suitably be immobilised onto a solid or semi-solid support. Examples of solid and semi-solid support are those mentioned above, i.e. particles, beads, biodegradable particles, sheets, gels, filters, membranes, fibres, capillaries, needles, microtitre strips, tubes, plates or wells, combs, pipette tips, micro arrays, and chips. In particular, the solid support can be selected from particles and beads, preferably particles and beads, which are polymeric, magnetic or superparamagnetic.

[0323] For in vivo therapy, biodegradable particles will be especially preferred, while for ex vivo therapy, biodegradable, polymeric, magnetic, paramagnetic or superparamagnetic particles will be especially preferred.

[0324] As mentioned, the pharmamers used in therapeutic vaccine settings are very interesting molecule poly-ligand compounds possessing highly appropriate properties for modulation of various immune cells both in vivo and ex vivo.

[0325] The poly-ligand pharmamers can, due to the one or more multimerization domain(s), be loaded with a plurality of biologically or immunologically active molecules to ensure high avidity binding to specific counter receptors.

[0326] It is to be understood that such responses include inducing anergy leading to apoptosis, up-regulating a response, down-regulating a response, stimulating a response, modulating a response, enhancing a response, inhibiting a response, and in any other way manipulating a response. In this connection, it should be understood that the MHC molecules/peptides of the construct can be chosen so as to induce a number of other responses, or activate signal pathways which results in the production of various signalling substances which can have a beneficial influence on the disease to be treated, prevented or alleviated.

[0327] Furthermore, this desired effect of one or more of the molecules of a pharmamer can be ameliorated, enhanced, reduced, inhibited, stimulated or combined with other effects by the further attachment of other biologically active compounds as described above.

[0328] A variety of diseases, including cancer causes immunosuppression in the patients. Immunotherapy using therapeutic vaccines is an attempt to stimulate the patient's own immune system to recognise and destroy cancer cells. The tumour can exert its suppressive influence over the immune system through several different mechanisms. Although tumour cells can prime the immune system, tumour escape mechanisms can induce immunological tolerance to the tumour. There are several known mechanisms of tumour escaping immune surveillance. For instance, tumour cells are often inefficient in presenting tumour antigens to effector T-cells. This can be the result of tumour cell down-regulation or mutation of MHC molecules, or down-regulation of co-stimulatory molecules such as B7, or other molecules, such as TAP, that are important in the antigen presenting pathway.

[0329] Furthermore, tumour cells have been shown to induce tolerance in T-cells by down-regulating the expression of CD3-zeta chain in T-cells. Tumour cells can also suppress T-cell activation by release of inhibitory cytokines, and induce apoptosis in T-cells through Fas-Fas ligand interaction. Tumour cells also have the ability to suppress the immune system through release of cytokines such as IL-12 that inhibits the maturation of immature dendritic cells into fully mature antigen presenting cells. Inhibitory factors released by tumour cells have been shown to suppress granulocyte activation, thus avoiding the killing of tumour cells by activated granulocytes.

[0330] Common treatment regimes such as chemotherapy and radiation therapy also suppress immunity in a more general way. It is also known that the immune suppression that HIV infection cause leads to destruction of immune function cells.

[0331] A variety of different prior art strategies have been employed in an attempt to restore or enhance the patient's immune response to tumours, including treatment with monoclonal antibodies, cancer vaccines, cytokine therapy and adoptive cellular immunotherapy using dendritic cells or T-cells. Cellular immunotherapy involving T-cells include CD8+ cytotoxic effector cells that have the capacity to kill tumour cells. Furthermore, it has been shown that CD4+ cytokine producing T-cells also play an important role in maintaining a sustainable anti-tumour cell activity of cytotoxic CD8 cells. The success, however, of the prior art methods have been limited.

[0332] As mentioned the present invention relates to methods for the vaccine treatment of human beings and animals, comprising methods of administering a pharmamer as described herein in an effective amount.

[0333] The treatment can be such which involves up-regulation, down-regulation, modulation, stimulation, inhibition, restoration, enhancement and/and otherwise manipulation of immune responses. This can indeed be accomplished by the compositions of the present invention. The present invention also relates to methods of inducing anergy in a cell, by which methods a therapeutic composition as described herein is administered.

[0334] In a further aspect, the present invention relates to methods of performing adoptive immunotherapy, which methods comprise administrating to an animal, including a human being, a therapeutic composition as described herein.

[0335] As mentioned above, the therapeutic composition of the invention is suited for in vivo therapy.

[0336] The present invention further comprise pharmamer compositions for therapeutic and preventive vaccines that suitably comprise from 1 to 3, 1 to 4, 1 to 5, 1 to 6, 1 to 7, 1 to 8, 1 to 9, 1 to 10, or 1 to more than 10; 2 to 3, 2 to 4, 2 to 5, 2 to 6, 2 to 7, 2 to 8, 2 to 9, 2 to 10, or 2 to more than 10; 3 to 4, 3 to 5, 3 to 6, 3 to 7, 3 to 8, 3 to 9, 3 to 10, or 3 to more than 10; 4 to 5, 4 to 6, 4 to 7, 4 to 8, 4 to 9, 4 to 10, or 4 to more than 10; 5 to 6, 5 to 7, 5 to 8, 5 to 9, 5 to 10, or 5 to more than 10; 6 to 7, 6 to 8, 6 to 9, 6 to 10, or 6 to more than 10; 7 to 8, 7 to 9, 7 to 10, or 7 to more than 10; 8 to 9, 8 to 10, or 8 to more than 10; 9 to 10, or 9 to more than 10 different biologically active molecules.

[0337] Thus, the inclusion of two, three, four, five, six or more different biologically active molecules are contemplated and believed to be advantageous in some cases. The different molecules can be attached on the multimerization domain in any desired fixed ratio e.g. for a pharmamer with three different molecules termed A, B, and C, ratios such as but not limited to, 1:1:1, 1:2:1, 1:3:1, 1:4:1, 1:5:1, 2:1:1, 2:1:2, 2:3:2, 3:5:8, etc. and for a pharmamer with five different molecules attached, termed G, H, I, J, and K, ratios such as but not limited to, 2:4:3:6:5, 4:6:8:1:1, 10:1:2:5:2, etc. may apply. One or more of the molecules can be functioning as an adjuvant. Adjuvants or biologically active molecules or other ingredients may also be constituents of the final vaccine without being attached to the multimerization domain. These non-pharmamer vaccine constituents can be mixed with the pharmamer in any suitable ratio(s).

### Dosage, Administration and Preparation

[0338] The individual to receive the vaccine composition according to the present invention may be any individual in need thereof, preferably a mammal in need thereof, more preferably a human being in need thereof, such as a newborn, a child, an adult, a woman or a man.

[0339] In one preferred embodiment the vaccine composition is administered prophylactically and in this embodiment the individual in need thereof, may be any individual at risk of encountering the given clinical condition against which the vaccine composition is directed.

[0340] When selecting biologically active molecules to be used in a pharmamer one needs to carefully consider the possibilities of unwanted adverse or serious adverse reactions.

[0341] It is further contemplated that the amount of pharmamer construct required to induce a systemic immune response will typically be in the range of from 0.0001 to 10000 ug/kg/dose, such as from 0.01 to 1000 ug/kg/dose, from 0.1 to 100 ug/kg/dose, or from 1 to 10 ug/kg/dose.

[0342] In one embodiment, each dosage unit of said vaccine composition preferably comprises in the range of 0.01 to 1 μg, such as in the range of 0.05 to 1 μg, for example in the range of 0.1 to 1 μg, such as in the range of 0.05 to 1 μg, for example in the range of 0.1 to 1 μg, such as in the range of 0.05 to 0.8 μg, for example in the range of 0.05 to 0.6 μg, such as in the range of 0.05 to 0.4 μg, for example in the range of 0.05 to 0.2 μg, such as in the range of 0.1 to 0.8 μg, for example in the range of 0.1 to 0.6 μg, such as in the range of 0.1 to 0.5 μg, for example in the range of 0.1 to 0.4 μg, such as in the range of 0.1 to 0.3 μg, for example in the range of 0.1 to 0.2 μg of the pharmamer or peptide of the present invention.

[0343] In one embodiment the daily dosage of the pharmamer may be varied over a wide range from 0.001 to 1,000 mg per adult human/per day. For oral administration, the compositions are preferably provided in the form of scored or unscored tablets containing 0.01, 0.05, 0.1, 0.5, 1.0, 2.5, 5.0, 10.0, 15.0, 25.0, and 50.0 milligrams of the active ingredient for the symptomatic adjustment of the dosage to the patient to be treated. An effective amount of the drug is ordinarily supplied at a dosage level of from about 0.0001 mg/kg to about 100 mg/kg of body weight per day. The range is more particularly from about 0.001 mg/kg to 10 mg/kg of body weight per day. Even more particularly, the range varies from about 0.05 to about 1 mg/kg.

[0344] Of course the dosage level will vary depending upon the potency of the particular compound. Certain compounds will be more potent than others. In addition, the dosage level will vary depending upon the bioavailability of the compound. The more bioavailable and potent the compound, the less compound will need to be administered through any delivery route, including but not limited to oral delivery.

[0345] The amount of the immunogenic peptide of the invention in the pharmaceutical composition may vary, depending on the particular application. However, a single dose of the immunogen is in one embodiment preferably anywhere from about 10 μg to about 5000 μg, more preferably from about 50 μg to about 2500 μg such as about 100 μg to about 1000 μg.

[0346] Modes of administration include intradermal, subcutaneous and intravenous administration, implantation in the form of a time release formulation, etc. Any and all forms of administration known to the art are encompassed herein. Also any and all conventional dosage forms that are known in the art to be appropriate for formulating injectable immunogenic peptide composition are encompassed, such as lyophilised forms and solutions, suspensions or emulsion forms containing, if required, conventional pharmaceutically acceptable carriers, diluents, preservatives, adjuvants, buffer components, etc.

[0347] The vaccine compositions may be administered in any suitable manner. For example the vaccine compositions may be administered enterally, parenterally, transdermally, orally, by inhalation and/or over a mucosal membrane.

[0348] In a preferred embodiment, the vaccine compositions are administered parenterally. Examples of parenteral routes of administration include injections and infusions, e.g. intravenous, intraarterial, intramuscular, intracardial, subcutaneous, intraosseous, intradermal, intraperitonal or intrethecal. A preferred route of parenteral administration of the vaccine composition is by subcutaneous injection. A suitable administration form for parenteral administration is a solution or dispersion.

[0349] Pharmamer vaccine compositions administered more than once can be administered by same route or by alternating routes. Similarly the individual components of the vaccine can be administered alone or in combinations by the same route or by alternating/mixed routes

[0350] In some embodiments of the present invention it is desirable that the pharmaceutical composition comprises an isotonic agent. In particular when the pharmaceutical composition is prepared for administration by injection or infusion it is often desirable that an isotonic agent is added.

[0351] Accordingly, the composition may comprise at least one pharmaceutically acceptable additive which is an isotonic agent.

[0352] The pharmaceutical composition may be isotonic, hypotonic or hypertonic. However it is often preferred that a pharmaceutical composition for infusion or injection is essentially isotonic, when it is administrated. Hence, for storage the pharmaceutical composition may preferably be isotonic or hypertonic. If the pharmaceutical composition is hypertonic for storage, it may be diluted to become an isotonic solution prior to administration.

[0353] The isotonic agent may be an ionic isotonic agent such as a salt or a non-ionic isotonic agent such as a carbohydrate.

[0354] Examples of ionic isotonic agents include but are not limited to NaCl, CaCl₂, KCl and MgCl₂. Examples of non-ionic isotonic agents include but are not limited to mannitol, sorbitol and glycerol.

[0355] It is also contained within the present invention that at least one pharmaceutically acceptable additive is a buffer. For some purposes, for example, when the pharmaceutical composition is meant for infusion or injection, it is often desirable that the composition comprises a buffer, which is capable of buffering a solution to a pH in the range of 4 to 10, such as 5 to 9, for example 6 to 8.

[0356] However, in other embodiments of the invention the pharmaceutical composition may comprise no buffer at all or only micromolar amounts of buffer.

[0357] The buffer may for example be selected from the group consisting of TRIS, acetate, glutamate, lactate, maleate, tartrate, phosphate, citrate, carbonate, glycinate, histidine, glycine, succinate and triethanolamine buffer.

[0358] TRIS buffer is known under various other names for example tromethamine including tromethamine USP, THAM, Trizma, Trisamine, Tris amino and trometamol. The designation TRIS covers all the aforementioned designations.

[0359] The buffer may furthermore for example be selected from USP compatible buffers for parenteral use, in particular, when the pharmaceutical formulation is for parenteral use.

[0360] For example the buffer may be selected from the group consisting of monobasic acids such as acetic, benzoic, gluconic, glyceric and lactic, dibasic acids such as aconitic, adipic, ascorbic, carbonic, glutamic, malic, succinic and tartaric, polybasic acids such as citric and phosphoric and bases such as ammonia, diethanolamine, glycine, triethanolamine, and TRIS.

[0361] The vaccine composition may also comprise antioxidants and/or reducing agents for example acetone sodium bisulfite, ascorbate, bisulfite sodium, butylated hydroxy anisole, butylated hydroxy toluene, cystein/cysteinate HCL, dithionite sodium, gentisic acid, gentisic acid ethanolamine, glutamate monosodium, formaldehyde sulfoxylate sodium, metabisulfite potassium, metabisulfite sodium, monothioglycerol, propyl gallate, sulfite sodium and thioglycolate sodium.

[0362] In another embodiment the vaccine composition is administered transdermally. Examples of useful administration forms for transdermal administration include ointment, gel, cream, gel-like cream, paste, liquid, lotion, aerosol, spray, liniment, plaster, poultice, foam, bath admixture, a patch and a bandage. Preferably, if the vaccine composition is to be administered transdermally, it is preferably in the form of a patch.

[0363] Ointments, lotions, creams and the like may be prepared as described in Remington “The science and practice of pharmacy”, chapter 44 pages 845-851, 20^{th} edition. Patches for transdermal vaccines may be prepared by any conventional methods, for example as described in EP1384403 or WO2004/030696. Preferably patches for transdermal vaccines are prepared essentially as described in Examples 4 to 13 of WO2004/03069 except that the transdermal patches should comprise the vaccine composition according to the present invention. The skilled person will readily be able to make the required adaptations.

[0364] For inhalation the vaccine composition may be administered in the form of an aerosol and/or spray dosage form which can be prepared, for example, by filling an aerosol container with above-mentioned solution for example, together with an injection agent such as liquefied petroleum gas. A poultice can be prepared by adding the above mentioned vaccine composition to an ointment base formed from a partially neutralized polyacrylic acid, sodium polyacrylate, and the like.

[0365] For oral administration, the vaccine composition may be administered in the form of a tablet, capsule, drop, liquid mixture or powder. Tablet, capsules, and drops may be swallowed or chewed. Oral administration may result in uptake via the mucosa in the mouth, such as buccal or sublingual uptake, and/or in uptake via the gastro-intestinal route, such as uptake over the mucosa of the intestines.

[0366] As the pH adjuster, for example, lactic acid, citric acid, phosphoric acid and the like can be mentioned for adjusting to a lower pH range, and sodium hydroxide, potassium hydroxide, sodium lactate, sodium citrate, monoethanolamine and diisopropanolamine and the like can be mentioned for adjusting to a higher pH range. Addition of carboxyvinyl polymer, which is a water-soluble polymer, can also achieve a lower pH. Buffers such as acetate buffer, a phosphate buffer, a citrate buffer, a succinate buffer or TRIS may also be included for pH adjustment.

[0367] As the stabilizer, for example, ascorbic acid, dibutylhydroxytoluene, sodium thiosulfate, sodium thioglycolate, sodium thiomalate, erythorbic acid, sodium erythorbate, sodium pyrosulfite, benzoic acid, sodium benzoate, sodium alginate, sodium caprylate, L-arginine, L-cysteine, dl-.alpha.-tocopherol, tocopherol acetate, propyl gallate, disodium edetate and the like can be mentioned.

[0368] As the preservative, for example, benzethonium chloride, benzalkonium chloride, methylparaben, ethylparaben, propylparaben, chlorobutanol, benzyl alcohol, thimerosal and the like can be mentioned.

[0369] The vaccine compositions of the present invention may also be administered over a mucosal membrane. Thus, the vaccine composition may be applied to any mucous membrane including the conjunctiva, nasopharynx, orthopharnyx, vagina, colon, urethra, urinary bladder, lung, large (rectal) and small (enteral) intestine.

[0370] When administered ocularly or nasally, the compositions of the present invention can be formulated in an aqueous solution buffered to a pH of between 3.0 and 8.0, most preferably pH 5.0-5.4, by means of a pharmaceutically acceptable buffer system. Any pharmaceutically acceptable buffering system capable of maintaining the pH in the preferred ranges can be used in the practice of this invention. A typical buffer will be, for example, an acetate buffer, a phosphate buffer, a citrate buffer, a succinate buffer, or the like. The concentration of buffer is typically in the range from between 0.005 and 0.1 molar, most preferably about 0.02 molar.

[0371] The container, e.g. nasal applicator or eye drop bottle, may contain sufficient composition for a single nasal or ocular dosing or for several sequential dosages.

[0372] In one embodiment of the invention, the vaccine compositions of the present invention may be formulated for sustained release. For example, one or more of the immune stimulating complex, carrier protein, saccharide antigen and/or aluminium containing adjuvant may be combined with a silicone elastomer that releases the saccharide antigen over a long period of time. The silicone elastomer can also comprise albumin. See U.S. Pat. No. 4,985,253, the contents of which are fully incorporated by reference herein. The release rate of the antigen from the silicone elastomer can be controlled by incorporation of a water soluble or fat soluble mixing agent or cosolvent (e.g., polyethylene glycol 400, polysorbate 80, sodium alginate, L-alanine, sodium chloride, polydimethylsiloxane) into the silicone elastomer. Any other additive can also be incorporated into the silicone elastomer for the purpose of accelerating the release rate.

[0373] The vaccine composition according to the invention may be formulated into unit dosage forms, wherein each unit, for example a sealed container, comprises one dosage of the vaccine composition.

[0374] The vaccine compositions may be administered once; however, more often the vaccine compositions are administered more than once, such as more than 2 times, for example more than 5 times, such as more than 10, for example more than 15, such as more than 20, for example more than 30 times, such as more than 50 times, for example more than 100 times. Preferably, the vaccine compositions are administered in the range of 2 to 10 times, more preferably in the range of 2 to 5 times, such as twice.

[0375] When the vaccine composition is administered more than once, the time period between two individual administrations is typically in the range of 1 week to 5 years, such as in the range of 1 month to 2 year, for example in the range of 1 month to 1 year, such as in the range of 2 months to 7 months. If the vaccine composition is administered more than twice, then the time period between the individual administrations may each individually be any of the aforementioned. Thus by way of example the interval between the first and second administration may be around 2 months and the interval between the second and the third administration may be around 7 months.

[0376] In one embodiment the pharmamer based vaccines can be administered by several routes including but not limited to injection including intravenously, intramuscularly, subcutaneously, inter peritoneal injection and transmucosally (nasal, rectal, vaginal) application, by inhalation, per-orally or by inoculation.

[0377] The administration of pharmamers of the invention can be as single doses or as several doses. In certain cases, administration only once can be sufficient. In general, several doses should be given with intervals of a day, a week, two weeks, a month, or several months, etc. For example, a single dose can be given once, or a dose can be given as a primer, followed by one or more administration, or a continuous administration regime like up to four doses per week, followed by one month without administrations, followed by up to four doses per week. Further but not limiting examples are vaccination protocols where administration is performed on week 0, 4, 8, and 16; or on week 0, 2, 4, 6, 8, 10, 12, and 14; or on week 0, 5, 11, 17; or on month 0, 1, and 2; or on day 0, 7, and 30; or every year. Optionally with increasing amount of pharmamer; optionally with modified ratios of the biologically active molecules of the pharmamer construct; optionally using different adjuvants or combinations of adjuvants in the different administrations. Administration protocol can also be linked to age of the vaccine. Known examples are childhood vaccines. Examples of age related protocols, at the age of 3 month, 5, month, and 12 month; or 3 month, 5, month, 12 month, and 5 years; or 15 month, and 4 years. These examples are not exhaustive. The optimal administration regime depends on the pharmamer construct in question and several other factors. The person skilled in the art will readily know how to optimise this.

[0378] Of course, other medicaments can be administered simultaneously in order to enhance or support the vaccine treatment.

[0379] Containers for mixing and storage of the pharmamers of the invention can be made of glass or various polymeric materials. The containers chosen should not adsorb the product stored. The containers can suitably be ampoules or capped vials for mono- or multi-dosage.

[0380] The invention further relates to methods for producing the pharmamers of the invention, which methods comprise providing a pharmamer as described herein, and solubilising or dispersing (i.e. in suspension) the pharmamer in a medium suitable for therapeutic substances, and optionally adding other adjuvants and/or excipients. The medium can be in the form of a liquid, a gel, or an ointment. The pharmamer can also be embedded in a matrix being part of a solid pill, or powder inside a capsule.

[0381] As described herein the pharmamers can be useful as vaccines, as vaccine components or as engineered intelligent adjuvants. The possibility of creating pharmamers that specifically bind certain T cells with molecules that trigger, e.g. the humoral response or the innate immune response, can accelerate vaccine development and improve the efficiency of vaccines.

[0382] Vaccine compositions may be prepared and administered using any conventional protocol known by a person skilled in the art. Below is a non-limiting example of preparation of a vaccine composition according to the invention is given as well as a non-limiting example of administration of such as a vaccine. It will be appreciated by the person skilled in the art that the protocol may be easily adapted to any of the vaccine compositions described herein.

[0383] The peptides can e.g. be synthesized e.g. at the UVA Biomolecular Core Facility with a free amide NH₂ terminus and free acid COOH terminus. Each was provided as a lyophilized peptide, which was then reconstituted in sterile water and diluted with Lactated Ringer's solution (LR, Baxter Healthcare, Deerfield, Ill.) as a buffer for a final concentration of 67-80% Lactated Ringer's in water. These solutions were then sterile-filtered, placed in borosilicate glass vials, and submitted to a series of quality assurance studies including confirmation of identity, sterility, general safety, and purity, in accordance with FDA guidelines, as defined in IND 6453.

[0384] In practical circumstances, patients will receive a vaccine comprising about 100 μg of a class I HLA-restricted HIV peptide with or without a class II HLA-restricted HIV helper peptide. The patients are vaccinated with e.g. about 100 μg of the class I HLA peptide in adjuvant alone, or vaccinated with e.g. about 100 μg of the HLA class I-restricted peptide plus 190 μg of the class II-restricted helper peptide. The higher dose of the helper peptide is calculated to provide equimolar quantities of the helper and cytotoxic epitopes. Additionally, patients can be vaccinated with a longer peptide comprising the amino acid sequences of both peptides.

[0385] The above peptides, in 1-ml aqueous solution, can be administered either as a solution/suspension with about 100 μg of QS-21, or as an emulsion with about 1 ml of Montanide ISA-51 adjuvant.

[0386] Patients are immunized e.g. at day 0 and months 1, 2, 3, 6, 9, and 12, with the peptide pharmamer plus adjuvant, for a total of seven immunizations. With rare exceptions, the vaccinations are administered to the same arm with each vaccine. The peptide pharmamers are administered s.c.

### Adjuvants

[0387] Pharmamer vaccines of the present invention may be combined with adjuvant in order to improve the effect of the vaccine. Adjuvants are pharmacological or immunological agents that modify the effect of other agents (e.g. vaccines and drugs) while having few if any direct effects when given by themselves.

[0388] Adjuvants can be mixed with the vaccine and administered simultaneously with the vaccine. The adjuvant can be attached to one or more components of the vaccine by covalent or non-covalent interaction or be in the vaccine as an individual component. The adjuvant may also be administered before or after the vaccine is administered. More than one type of adjuvant can be used together with a given vaccine likewise one specific type of adjuvant may be used for more than one vaccine.

[0389] Immunological adjuvants are substances that stimulate the immune system and increase the response to a vaccine without having any specific antigenic effect itself. An immunological adjuvant either potentiates the immune responses to an antigen and/or modulates it towards the desired immune responses.

[0390] More than one adjuvant may be present in the final vaccine product. They may be combined together with a single antigen or all antigens present in the vaccine, or each adjuvant may be combined with one particular antigen.

[0391] Examples of immunological adjuvants include oil emulsions and surfactant based formulations e.g. MF59, QS21, AS02, Montanide ISA-51, ISA-720, Titermax gold, mineral salts (e.g. aluminiumhydroxide, aluminiumhydroxide gel, aluminium or calcium phosphate gels), particulate adjuvants (e.g. virosomes, AS04, immune stimulatory complexes (ISCOMs), polylactide co-glycolide (PLG)), natural and synthetic microbial derivatives (e.g. monophosphoryl lipid A (MPL), Detox (MPL+M. Phlei cell wall skeleton), AGP [RC-529] (synthetic acylated monosaccharide), DC_Chol (lipoidal immunostimulators able to self organize into liposome's), OM-174 (lipid A derivative), CpG motifs (synthetic oligonucleotides containing immunostimulatory CpG motifs), modified LT and CT (genetically modified bacterial toxins to provide non-toxic adjuvant effects), endogenous human immunomodulators, (e.g., hGM-CSF or hIL-12 (cytokines that can be administered either as protein or plasmid encoded), Immudaptin (C3d tandem array)), saponins, squalene or phosphate based adjuvants, lipopolysaccharides, Inert vehicles, such as gold particles microbial antigens, copolymers.

[0392] Adjuvant pertaining to the present invention may be grouped according to their origin, be it mineral, bacterial, plant, synthetic, or host product. The first group under this classification are the mineral adjuvants, such as aluminium compounds. Antigens precipitated with aluminum salts or antigens mixed with or adsorbed to performed aluminum compounds have been used extensively to augment immune responses in animals and humans. Aluminum particles have been demonstrated in regional lymph nodes of rabbits seven days following immunization, and it may be that another significant function is to direct antigen to T cell containing areas in the nodes themselves. Adjuvant potency has been shown to correlate with intimation of the draining lymph nodes. While many studies have confirmed that antigens administered with aluminum salts led to increased humoral immunity, cell mediated immunity appears to be only slightly increased, as measured by delayed-type hypersensitivity. Aluminum hydroxide has also been described as activating the complement pathway. This mechanism may play a role in the local inflammatory response as well as immunoglobulin production and B cell memory. Primarily because of their excellent record of safety, aluminum compounds are presently the only adjuvants used in humans.

[0393] While aluminum salts have been a sufficient adjuvant for strong immunogens that require only antibody responses to elicit protection, they may not always be effective when used with weak immunogens such as e.g. synthetic peptides of malaria, or for introducing cell-mediated immune responses or IgG isotype of the type required to fight infections. Thus, the immunostimulating fragment of TGF according to the present invention may in one embodiment act as an adjuvant or immunostimulator and may be conjugated or non-conjugated to the immunogenic determinant against which it is desirable to raise an immune response.

[0394] Another large group of adjuvants are those of bacterial origin. Adjuvants with bacterial origins can be purified and synthesized (e.g. muramyl dipeptides, lipid A) and host mediators have been cloned (Interleukin 1 and 2). The last decade has brought significant progress in the chemical purification of at least three adjuvants of active components of bacterial origin: Bordetella pertussis, lipopolysaccharide and Freund's Complete Adjuvant (FCA). Additionally suitable adjuvants in accordance with the present invention are e.g. Titermax, ISCOMS, Quil A, and ALUN, see U.S. Pat. Nos. 58,767 and 5,554,372, Lipid A derivatives, choleratoxin derivatives, HSP derivatives, LPS derivatives, synthetic peptide matrixes, GMDP, and other as well as combined with immunostimulants (U.S. Pat. No. 5,876,735).

[0395] B. pertussis is of interest as an adjuvant in the context of the present invention due to its ability to modulate cell-mediated immunity through action on T-lymphocyte populations. For lipopolysaccharide and Freund's Complete Adjuvant, adjuvant active moieties have been identified and synthesized which permit study of structure-function relationships. These are also considered for inclusion in immunogenic compositions according to the present invention.

[0396] Lipopolysaccharide and its various derivatives, including lipid A, have been found to be powerful adjuvants in combination with liposome's or other lipid emulsions. It is not yet certain whether derivatives with sufficiently low toxicity for general use in humans can be produced. Freund's Complete Adjuvant is the standard in most experimental studies.

[0397] Endogenous human immunomodulators are another group of adjuvants of interest for the present invention and among others include cytokines, interleukins, interferons and growth factors. These immunomodulators can be administered either as protein or plasmid encoded.

[0398] Many other types of materials can be used as adjuvants in immunogenic compositions according to the present invention. They include plant products such as saponin, animal products such as chitin, inert vehicles, such as gold particles and numerous synthetic chemicals.

[0399] Adjuvants according to the present invention can also be categorized by their proposed mechanisms of action. This type of classification is necessarily somewhat arbitrary because most adjuvants appear to function by more than one mechanism. Adjuvants may act through antigen localization and delivery, or by direct effects on cells making up the immune system, such as macrophages and lymphocytes. Another mechanism by which adjuvants according to the invention enhance the immune response is by creation of an antigen depot. This appears to contribute to the adjuvant activity of aluminum compounds, oil emulsions, liposomes, and synthetic polymers. The adjuvant activity of lipopolysaccharides and muramyl dipeptides appears to be mainly mediated through activation of the macrophage, whereas B. pertussis affects both macrophages and lymphocytes. Further examples of adjuvants that may be useful when incorporated into immunogenic compositions according to the present invention are described in U.S. Pat. No. 5,554,372.

[0400] At present only a few of the above mentioned adjuvants are approved for human use. Most relevant in this aspect are Alhydrogel (AluminiumHydroxide), MF59 and the proprietary Montanide ISA720.

[0401] In one embodiment adjuvants are any substance whose admixture into the vaccine composition increases or otherwise modifies the immune response to the pharmamers of the present invention.

[0402] Adjuvants could for example be selected from the group consisting of: AlK(SO₄)₂, AlNa(SO₄)₂, AlNH₄(SO₄), silica, alum, Al(OH)₃, Ca₃(PO₄)₂, kaolin, carbon, aluminum hydroxide, muramyl dipeptides, N-acetyl-muramyl-L-threonyl-D-isoglutamine (thr-DMP), N-acetyl-nornuramyl-L-alanyl-D-isoglutamine (CGP 11687, also referred to as nor-MDP), N-acetylmuramyul-L-alanyl-D-isoglutaminyl-L-alanine-2-(1′2′-dipalmitoyl-sn-glycero-3-hydroxphosphoryloxy)-ethylamine (CGP 19835A, also referred to as MTP-PE), RIBI (MPL+TDM+CWS) in a 2% squalene/Tween-80® emulsion, lipopolysaccharides and its various derivatives, including lipid A, Freund's Complete Adjuvant (FCA), Freund's Incomplete Adjuvants, Merck Adjuvant 65, polynucleotides (for example, poly IC and poly AU acids), wax D from Mycobacterium, tuberculosis, substances found in Corynebacterium parvum, Bordetella pertussis, and members of the genus Brucella, liposomes or other lipid emulsions, Titermax, ISCOMS, Quil A, ALUN (see U.S. Pat. Nos. 58,767 and 5,554,372), Lipid A derivatives, choleratoxin derivatives, HSP derivatives, LPS derivatives, synthetic peptide matrixes or GMDP, Interleukin 1, Interleukin 2, Montanide ISA-51 and QS-21. Preferred adjuvants to be used with the invention include Montanide ISA-51 and QS-21.

[0403] Montanide ISA-51 (Seppic, Inc.) is a mineral oil-based adjuvant analogous to incomplete Freund's adjuvant, which must be administered as an emulsion. QS-21 (Antigenics; Aquila Biopharmaceuticals, Framingham, Mass.) is a highly purified, water-soluble saponin that handles as an aqueous solution. QS-21 and Montanide ISA-51 adjuvants can be provided in sterile, single-use vials.

[0404] Additional preferred adjuvants capable of being used in vaccine compositions comprising one or more of the pharmamers of the present invention are e.g. any substance which promote an immune responses. Frequently, the adjuvant of choice is Freund's complete or incomplete adjuvant, or killed B. pertussis organisms, used e.g. in combination with alum precipitated antigen. A general discussion of adjuvants is provided in Goding, Monoclonal Antibodies: Principles & Practice (2nd edition, 1986) at pages 61-63. Goding notes, however, that when the antigen of interest is of low molecular weight, or is poorly immunogenic, coupling to an immunogenic carrier is recommended. Examples of such carrier molecules include keyhole limpet haemocyanin, bovine serum albumin, ovalbumin and fowl immunoglobulin. Various saponin extracts have also been suggested to be useful as adjuvants in immunogenic compositions. Recently, it has been proposed to use granulocyte-macrophage colony stimulating factor (GM-CSF), a well known cytokine, as an adjuvant (WO 97/28816).

[0405] Desirable functionalities of adjuvants capable of being used in accordance with the present invention are listed in the below table.

Modes of adjuvant action

| Action | Adjuvant type | Benefit |
|---|---|---|
| 1. Immunomodulation | Generally small molecules or | Upregulation of immune |
| | proteins which modify the | response. Selection of Th1 or |
| | cytokine network | Th2 |
| 2. Presentation | Generally amphipathic molecules | Increased neutralizing antibody |
| | or complexes which interact with | response. Greater duration of |
| | immunogen in its native | response |
| | conformation | |
| 3. CTL induction | Particles which can bind or | Cytosolic processing of protein |
| | enclose immunogen and | yielding correct class 1 |
| | which can fuse with or disrupt | restricted peptides |
| | cell membranes | Simple process if promiscuous |
| | w/o emulsions for direct | peptide(s) known |
| | attachment of peptide to cell | |
| | surface MHC-1 | |
| 4. Targeting | Particulate adjuvants which | Efficient use of adjuvant and |
| | bind immunogen. Adjuvants | immunogen |
| | which saturate Kupffer cells | As above. May also determine |
| | Carbohydrate adjuvants which | type of response if targeting |
| | target lectin receptors on | selective |
| | macrophages and DCs | |
| 5. Depot Generation | w/o emulsion for short term | Efficiency |
| | Microspheres or nanospheres for | Potential for single-dose |
| | long term | vaccine |

Source: Cox, J. C., and Coulter, A. R. (1997). Vaccine 15, 248-56.

[0406] A vaccine composition according to the present invention may comprise more than one different adjuvant. Furthermore, the invention encompasses a therapeutic composition further comprising any adjuvant substance including any of the above or combinations thereof. It is also contemplated that one or more of the pharmamers according to the present invention, and the adjuvant can be administered separately in any appropriate sequence.

[0407] In one embodiment the present invention relates to a vaccine composition comprising more than 1 vaccine adjuvant, such as more than 2, 3, 4, 5, 6, 7, 8, 9, 10, 11, 12, 13, 14, 15, 16, 17, 18, 19, 20, 25, 30, 35, 40, 45, 50, 55, 60, 65, 70, 75, 80, 85, 90, 95, 100, 200, 300, 400, 500, 600, 700, 800, 900, 1,000, 2,000, 3,000, 4,000, 5,000, 6,000, 7,000, 8,000, 9,000, or more than 10,000 vaccine adjuvants.

[0408] In another embodiment the present invention relates to a vaccine composition comprising more than 1 different vaccine adjuvant, such as more than 2, 3, 4, 5, 6, 7, 8, 9, 10, 11, 12, 13, 14, 15, 16, 17, 18, 19, 20, 25, 30, 35, 40, 45, 50, 55, 60, 65, 70, 75, 80, 85, 90, 95, 100, 200, 300, 400, 500, 600, 700, 800, 900, 1,000, 2,000, 3,000, 4,000, 5,000, 6,000, 7,000, 8,000, 9,000, or more than 10,000 different vaccine adjuvants.

[0409] In yet another embodiment the present invention relates to a vaccine composition comprising more than 1 identical vaccine adjuvant, such as more than 2, 3, 4, 5, 6, 7, 8, 9, 10, 11, 12, 13, 14, 15, 16, 17, 18, 19, 20, 25, 30, 35, 40, 45, 50, 55, 60, 65, 70, 75, 80, 85, 90, 95, 100, 200, 300, 400, 500, 600, 700, 800, 900, 1,000, 2,000, 3,000, 4,000, 5,000, 6,000, 7,000, 8,000, 9,000, or more than 10,000 identical vaccine adjuvants.

[0410] In one embodiment the present invention relates to a vaccine composition comprising less than 10,000 vaccine adjuvants, such as for example less than 9,000, 8,000, 7,000, 6,000, 5,000, 4,000, 3,000, 2,000, 1,000, 900, 800, 700, 600, 500, 400, 300, 200, 100, 95, 90, 85, 80, 75, 70, 65, 60, 55, 50, 45, 40, 35, 30, 25, 20, 15, 10, 9, 8, 7, 6, 5, 4, 3, or less than 2 vaccine adjuvants.

[0411] In one embodiment the present invention relates to a vaccine composition comprising less than 10,000 different vaccine adjuvants, such as for example less than 9,000, 8,000, 7,000, 6,000, 5,000, 4,000, 3,000, 2,000, 1,000, 900, 800, 700, 600, 500, 400, 300, 200, 100, 95, 90, 85, 80, 75, 70, 65, 60, 55, 50, 45, 40, 35, 30, 25, 20, 15, 10, 9, 8, 7, 6, 5, 4, 3, or less than 2 different vaccine adjuvants.

[0412] In one embodiment the present invention relates to a vaccine composition comprising less than 10,000 identical vaccine adjuvants, such as for example less than 9,000, 8,000, 7,000, 6,000, 5,000, 4,000, 3,000, 2,000, 1,000, 900, 800, 700, 600, 500, 400, 300, 200, 100, 95, 90, 85, 80, 75, 70, 65, 60, 55, 50, 45, 40, 35, 30, 25, 20, 15, 10, 9, 8, 7, 6, 5, 4, 3, or less than 2 identical vaccine adjuvants.

### Vaccine Enhancers

[0413] A vaccine enhancer may be present in the pharmamer vaccine independently of an adjuvant. The function of a vaccine enhancer can for example be to increase the molecular weight of the pharmamer in order to increase their activity or immunogenicity, to confer stability, to increase the biological activity, or to increase serum half-life. Furthermore, a vaccine enhancer may aid presenting the pharmamer to T-cells. The vaccine enhancer may be any suitable vaccine enhancer known to the person skilled in the art, for example a protein or an antigen presenting cell. A vaccine enhancer protein could be but is not limited to keyhole limpet hemocyanin, serum proteins such as transferrin, bovine serum albumin, human serum albumin, thyroglobulin or ovalbumin, immunoglobulins, or hormones, such as insulin or palmitic acid. For immunization of humans, the vaccine enhancer must be a physiologically acceptable vaccine enhancer acceptable to humans and safe. However, tetanus toxoid and/or diphtheria toxoid are suitable vaccine enhancers in one embodiment of the invention. Alternatively, the vaccine enhancer may be dextrans for example sepharose.

[0414] In one embodiment, the vaccine composition may comprise dendritic cells. The dendritic cells (DC) may be prepared and used in therapeutic procedure according to any suitable protocol.

Combination with Other Vaccines/Vaccine Components

[0415] In another embodiment of the present invention the composition of a pharmamer vaccine may be also comprise one or more other type of vaccines or vaccine components different from pharmamers, i.e. such a composition may have a pharmamer vaccine component and one or more other vaccine components. Such other vaccine components may be categorized depending on several characteristics, including way of action; being prophylactic or therapeutic i.e. whether the vaccine induce complete prevention from disease; or improvement of disease or relief from disease symptoms; way of administration; times of administration; what kind of physical feature or matter is administered; what specific physical feature or matter is treated and how is this feature or matter treated.

### Other Vaccine Components of the Present Invention Include:

[0416] A vaccine is an antigenic preparation used to establish immunity to a disease or illness and thereby protects or cures the body from a specific disease or illness. Vaccines are either prophylactic and prevent disease or therapeutic and treat disease. Vaccines may contain more than one type of antigen and is then called a combined vaccine.

[0417] Example, prophylactic vaccines are conventional vaccines for infectious diseases, such as measles, mumps, and tetanus. These vaccines are effective because they expose the immune system to weakened versions of the disease. This exposure causes the immune system to respond by producing antibodies. Once the immune system has created antibodies, some of the activated immune cells remember the exposure. Therefore, the next time the same antigen enters the body, the immune system can respond more readily to destroy it.

[0418] For cancer treatment, researchers are developing vaccines that can encourage the immune system to recognize cancer cells. These vaccines can help the body reject tumors and prevent cancer from recurring. In contrast to traditional vaccines against infectious diseases, cancer vaccines are designed to be injected after the disease is diagnosed, rather than before it develops and are therefore therapeutic. By example, it has been shown that immunization with dendritic cells (DC) loaded with appropriate peptides from tumor associated antigens (TAAs) stimulate “tumor specific” T-cells, which in some patients prevent further progression of the disease and eventually lead to regression of the disease.

[0419] In the present invention other vaccines/other vaccine components are subdivided into the following categories:
[0420] Vaccines made of living virulent microorganisms. Virulence refers to the degree of pathogenicity of a microbe, or in other words the relative ability of a microbe to cause disease. Examples of such organisms include but is not limited to bacteria, virus, parasites or other pathogens. Most pathogens will not be useful for vaccines if they are fully virulent but certain natural occurring modest virulent strains can be used. The vaccine may result in protection against the organism used for vaccination but may also induce protections against related virulent organisms
   [0421] The organism may be fully virulent
   [0422] The organism may be partly virulent meaning that the virulence of the organism has been reduced. Such organisms are often called live attenuated microorganisms. Attenuated means reducing the virulence of the microorganism while keeping it viable. Examples of reducing the virulence og an microorganism includes but is not limited to
      [0423] Modifying the microorganism by physical means, e.g. by heating
      [0424] Modifying the microorganism by chemical means, e.g. by addition of chemicals to the microorganism.
      [0425] Genetically modified microorganisms, e.g. recombinant bacteria or virus missing virulence factors
      [0426] Cultured under conditions that disable their virulent properties One way to reduce the virulence of an organism is passage through a foreign host e.g. tissue cultures, embryo eggs or live animals.
[0427] Killed microorganisms are another type of vaccine. Microorganisms can be killed in several ways including but not limited to
   [0428] Physically killing
      [0429] Killing by heating
      [0430] Killing by radioactive irradiation
   [0431] Chemically killing, e.g. by treatment with phenol, formaldehyde or other chemicals able to kill microorganism.
[0432] Subunit/fragment(s) of microorganism can be used as vaccine. The fragments may be isolated directly from microorganism or produced using recombinant DNA technology. Fragments/subunits of microorganisms useful in vaccines of the present invention includes but is not limited to
   [0433] Macromolecules, e.g. naturally occurring or artificial made. Macromolecules of the present invention includes but is not limited to:
      [0434] Proteins. The proteins may be full length or truncated and may be modified e.g. by introduction of additional amino acids, mutated, chemically modified (e.g. acetylation, methylation, Pegylation, phosphorylation, glycosylation etc.) or carrying other modifications e.g. converted into lipoprotein by the N-terminal addition of NE-palmytoyl-lysine. The proteins may also be stabilized by covalent or non-covalent attachment of protein linkers or other protein molecules. Proteins of the present invention includes but is not limited to:
         [0435] Proteins of the immune system
         Cytokines
         Interleukins (cytokines produces by
         Interferon's (cytokines that can induce cells to resist viral replication)
         Chemokines or their receptors
         Antibodies (monoclonal, polyclonal,
         Full length
         Fab fragments
         scFv fragments
         antibody-like (scaffolds)
         MHC molecules.
         MHC I molecules
         MHC I molecules consisting of full length or truncated heavy chain, full length or truncated β2m and peptide
         MHC I molecule consisting of full length or truncated heavy chain and full length and truncated β2m but no peptide (empty MHC I molecule)
         MHC I molecule consisting of full length or truncated heavy chain and peptide
         MHC I molecule consisting of full length or truncated heavy chain
         MHC II molecules
         MHC II molecules consisting of full length or truncated alpha chain and full length or truncated beta chain and peptide
         MHC II molecules consisting of full length or truncated alpha truncated beta chain but no peptide (empty MHC II molecule)
         Peptides
         Antigenic peptides, meaning any peptide that is bound or able to bind MHC molecules.
         With binding motif for MHC I
         With binding motif for MHC II
         Other peptides
         Heat shock proteins e.g. HSP70 and HSP90
         T cell receptor (TCR)
         Full length
         Truncated
         Stabilized by e.g. a peptidelinker
         [0436] Proteins from microorganisms
         Surface proteins
         Intracellular proteins
         Secreted proteins (e.g. toxins)
         Unmodified
         Modified (e.g. toxoid)
         Chemically modified
         Physically modified
      [0437] Nucleic acids
         [0438] DNA
         Encoding protein
         Structural not encoding protein
         [0439] RNA
         Ribosome's
         Antisense
         Silencing RNA
         Micro RNA
         [0440] LNA
         [0441] PNA
      [0442] Carbohydrates
         [0443] Saccharides and derivatives thereof, e.g. phosphorylated, oxidized, reduced, amino derivatives, acetylated etc. Saccharides may have more than one modification
         Monosaccharide's
         Disaccharides
         Polysaccharides
         Homopolysaccharides (e.g. glycans, dextran)
         Polymers of repeating disaccharide units in which one of the sugars are is either N-acetylgalactosamine or N-acetylglucosamine (e.g. Glucosaminoglycans)
         Polysaccharide-peptide polymer (Peptidoglycan (bacterial cell wall))
         [0444] Proteins carrying covalent attached oligosaccharides or polysaccharides (Glycoprotein's)
         [0445] Lipids carrying covalent attached oligo- or polysaccharides (Glycolipids)
   [0446] All macromolecules may be individual or in complex (e.g. attached to polymer backbone, solid support e.g. beads or other solid support, microspheres, liposome's or other nanoclusters)
[0447] Cell based vaccine is another type of vaccine of the present invention. Characteristics of different cell based vaccines are listed below.
   [0448] Consisting of naturally occurring cells
      [0449] Cells are isolated and optionally amplified e.g. by proliferation
      [0450] Cells are isolated and modified to display specific molecules e.g. specific MHC complexes by incubation with antigenic peptide. Following modification the cells may be proliferated.
   [0451] Consisting of non-naturally occurring cells. Non-naturally occurring cells of the present invention includes but is not limited to:
      [0452] Chemically modified cells
      [0453] Genetically modified cells
         [0454] Cells fused to another cell (e.g. hybridomas)
         [0455] Cells transfected, transformed or transduced with genes or nucleic acids encoding specific proteins (e.g. with super coiled plasmid DNA linear DNA, RNA, siRNA or other)

### Examples of Pharmamer Vaccines

[0456] A pharmamer vaccine can be designed to elicit a multifunctional immune response i.e. a composite immune responses directed against both arms of the immune system being the adaptive and the innate immune system; and both parts of the adaptive system i.e. the humoral and the cellular part.

[0457] Example, a pharmamer vaccine against HIV (Human Immunodeficiency virus) can be designed to elicit a multifunctional immune response by combining two or more of the following components:

[0458] HLA class 1 and class 2 molecules (Human major histocompatibility antigens) for stimulation of an allo-response i.e. a response against foreign HLA. The HLA class 1 molecules are folded or partly folded with human b2Microglobulin and a peptide fitting into the binding groove. The HLA class 1 heavy chain can be complete, partial or otherwise modified. The HLA class 2 molecules consist of folded or partly folded alpha- and beta-chains with or without a peptide in the binding groove. The HLA class 2 alpha- and beta-chains can be complete, partial or otherwise modified. The peptides bound in the binding grooves may be chosen among binding-peptides derived from HIV specific proteins, i.e. Gag-Pol, Pr55(Gag), Vif, Vpr, Tat, Rev, Vpu, Nef, gp160 and derivatives such as gp120, gp41 and gp140, or they may be HIV unrelated. HIV virus carries the former host's HLA class 1 and 2 in the viral membrane. The HLA molecules elicit allo-responses directed against the foreign HLA molecules and recently it has been shown that allo-responses upregulate the intracellular anti HIV-1 factor (APOBEC3G) shown to play a crucial part in protection against HIV infection;

HLA class 1 peptides derived from regions of the class 1 heavy chain;
HLA class 2 peptides derived from regions of the class 2 alpha and/or beta chain;
CD4 or part(s) hereof, the major receptor for HIV virus entry;
CCR 5 (Chemokine Receptor 5) or part(s) hereof. CCR5 is an important co-receptor for HIV virus entry into the host cell. In addition the extracellular peptide-loops of CCR5 are known to inhibit strains of HIV and SIV and act synergistically with HSP70 to stimulate the innate immune responses;
CXCR4 or part(s) hereof. CXCR4 can function as co-receptor for HIV virus entry into the host cell;
CCR 2 (Chemokine Receptor 2) or part(s) hereof. CCR2 can function as co-receptor for HIV virus entry into the host cell;
CX3CR1 or part(s) hereof. CX3CR1 can function as co-receptor for HIV virus entry into the host cell;
SDF-1 or part(s) hereof. SDF-1 can function as co-receptor for HIV virus entry into the host cell;
US28 or part(s) hereof. US28 is a CMV (Cytomegalovirus) protein expressed on already CMV infected cells that can function as co-receptor for HIV virus entry into the host cell;
HIV viral specific proteins i.e. Gag-Pol, Pr55(Gag), Vif, Vpr, Tat, Rev, Vpu, Nef, gp160 and derivatives such as but not limited to gp120, gp41 and gp140;
HSP70 (70 kD Heat-shock protein) or part(s) hereof. HSP70 induces a robust mucosal immune response. HSP70 in addition generates a number of anti-HIV functions, such as inducing production of the CCR5 binding CC chemokines, blocking CCR5 directly, and stimulating DC (Dendritic Cells) to produce IL-15 which inhibits HIV-1 and enhances the inhibitory effect of CD8-SF (CD8 Suppressor Factor). HSP70 enhances memory T cells, upregulates the costimulatory CD40-CD40L pathway and induces cross-presentations of antigens. An important feature is that HSP70 upregulate the intracellular anti HIV-1 factor, APOBEC3G (apolipoprotein B mRNA-editing, enzyme-catalytic, polypeptide-like-3G) which has recently been shown to play a crucial role in protection against HIV infection

[0459] The pharmamer HIV vaccine can be applied at the cervico-vaginal mucosa i.e. vaginally or IM i.e. intra-muscular. The pharmamer HIV vaccine can be administered alone or together with additional adjuvant(s) such as but not limited to Titermax Gold, Alhydrogel (Aluminium-hydroxide), MF59 and the proprietary Montanide ISA720.

[0460] Example, a pharmamer vaccine against SIV (Simian Immunodeficiency virus) can be designed to elicit a multifunctional immune response by combining two or more of the following components:

Simian Mamu class 1 and/or class 2 molecules (Mokey major histocompatibility antigens) for stimulation of an allo-response i.e. a response against foreign Mamu. The Mamu class 1 molecules are folded or partly folded with human b2Microglobulin and a peptide fitting into the binding groove. The Mamu class 1 heavy chain can be complete, partial or otherwise modified. The Mamu class 2 molecules consist of folded or partly folded alpha- and beta-chains with or without a peptide in the binding groove. The Mamu class 2 alpha- and beta-chains can be complete, partial or otherwise modified. The peptides bound in the binding grooves may be chosen among binding-peptides derived from SIV specific proteins, i.e. Gag-Pol, Gag, Vif, Vpx, Envelope protein, Nef, or they may be SIV unrelated. HIV virus carries the former host's Mamu class 1 and 2 in the viral membrane. The Mamu molecules elicit allo-responses directed against the foreign Mamu molecules and recently it has been shown that allo-responses upregulate the intracellular anti HIV-1 factor (APOBEC3G) shown to play a crucial part in protection against HIV infection;
Mamu class 1 peptides derived from regions of the class 1 heavy chain;
Mamu class 2 peptides derived from regions of the class 2 alpha and/or beta chain;
CD4 or part(s) hereof, the major receptor for SIV virus entry;
CCR 5 (Chemokine Receptor 5) or part(s) hereof. CCR5 is an important co-receptor for SIV virus entry into the host cell. In addition the extracellular peptide-loops of CCR5 are known to inhibit strains of HIV and SIV and act synergistically with HSP70 to stimulate the innate immune responses;
CXCR4 or part(s) hereof. CXCR4 can function as co-receptor for SIV virus entry into the host cell;
CCR 2 (Chemokine Receptor 2) or part(s) hereof. CCR2 can function as co-receptor for SIV virus entry into the host cell;
CX3CR1 or part(s) hereof. CX3CR1 can function as co-receptor for SIV virus entry into the host cell;
SDF-1 or part(s) hereof. SDF-1 can function as co-receptor for SIV virus entry into the host cell;
SIV viral specific proteins i.e. Gag-Pol, Gag, Vif, Vpx, Envelope protein, Nef;
HSP70 (70 kD Heat-shock protein) or part(s) hereof. HSP70 induces a robust mucosal immune response. HSP70 in addition generates a number of anti-SIV functions, such as inducing production of the CCR5 binding CC chemokines, blocking CCR5 directly, and stimulating DC (Dendritic Cells) to produce IL-15 which inhibits HIV-1 and enhances the inhibitory effect of CD8-SF (CD8 Suppressor Factor). HSP70 enhances memory T cells, upregulates the costimulatory CD40-CD40L pathway and induces cross-presentations of antigens. An important feature is that HSP70 upregulate the intracellular anti SIV factor, APOBEC3G (apolipoprotein B mRNA-editing, enzyme-catalytic, polypeptide-like-3G) which has recently been shown to play a crucial role in protection against SIV infection

[0461] The pharmamer HIV vaccine can be applied at the cervico-vaginal mucosa i.e. vaginally or IM i.e. intra-muscular. The pharmamer HIV vaccine can be administered alone or together with additional adjuvant(s) such as but not limited to Titermax Gold, Alhydrogel (Aluminium-hydroxide), MF59 and the proprietary Montanide ISA720.

### Combination Therapy

[0462] The present invention furthermore relates to pharmaceutical compositions and kit-of-parts for use in combination therapy.

[0463] Combination therapy as used herein denotes treatment an individual in need thereof with more than one different method. Hence combination therapy may in one aspect involve administration of a pharmaceutical composition or a kit of parts comprising a vaccine composition as described herein above and e.g. an anti-cancer or anti-HIV medicament.

[0464] Anti-cancer medicaments may be any of the medicaments described herein below, for example a chemotherapeutic agent or a immunotherapeutic agent.

[0465] In particular combination therapy may involve administration to an individual of a chemotherapeutic agent and/or an immunotherapeutic agent in combination with one or more of i) the pharmamer of the present invention, ii) an antigen presenting cell presenting the pharmamer of the present invention, and iii) an activated, pharmamer specific T-cell. However, combination therapy may also involve radiation therapy, gene therapy and/or surgery.

[0466] Combination therapy thus may include administration, simultaneously, or sequentially in any order, of e.g.:
[0467] i) the pharmamer of the present invention+at least one chemotherapeutic agent
[0468] ii) the pharmamer of the present invention+at least one immunotherapeutic agent
[0469] iii) Antigen presenting cell presenting the pharmamer of the present invention+at least one chemotherapeutic agent
[0470] iv) Antigen presenting cell presenting the pharmamer of the present invention+at least one immunotherapeutic agent
[0471] v) Activated T-cells+at least one chemotherapeutic agent
[0472] vi) Activated T-cells+at least one immunotherapeutic agent

[0473] Further combinations include i) and ii); iii) and iv); v) and vi); i) and iii); i) and iv), i) and v); i) and vi); ii) and iii); ii) and iv); ii) and v); ii) and vi); iii) and v); iii) and vi); iv) and v); iv) and vi); i) and iv) and any of v) and vi).

[0474] The chemotherapeutic agent can be e.g. methotrexate, vincristine, adriamycin, cisplatin, non-sugar containing chloroethylnitrosoureas, 5-fluorouracil, mitomycin C, bleomycin, doxorubicin, dacarbazine, taxol, fragyline, Meglamine GLA, valrubicin, carmustaine and poliferposan, MM1270, BAY 12-9566, RAS farnesyl transferase inhibitor, farnesyl transferase inhibitor, MMP, MTA/LY231514, LY264618/Lometexol, Glamolec, CI-994, TNP-470, Hycamtin/Topotecan, PKC412, Valspodar/PSC833, Novantrone/Mitroxantrone, Metaret/Suramin, Batimastat, E7070, BCH-4556, CS-682, 9-AC, AG3340, AG3433, Incel/VX-710, VX-853, ZD0101, ISI641, ODN 698, TA 2516/Marmistat, BB2516/Marmistat, CDP 845, D2163, PD183805, DX8951f, Lemonal DP 2202, FK 317, Picibanil/OK-432, AD 32/Valrubicin, Metastron/strontium derivative, Temodal/Temozolomide, Evacet/liposomal doxorubicin, Yewtaxan/Placlitaxel, Taxol/Paclitaxel, Xeload/Capecitabine, Furtulon/Doxifluridine, Cyclopax/oral paclitaxel, Oral Taxoid, SPU-077/Cisplatin, HMR 1275/Flavopiridol, CP-358 (774)/EGFR, CP-609 (754)/RAS oncogene inhibitor, BMS-182751/oral platinum, UFT (Tegafur/Uracil), Ergamisol/Levamisole, Eniluracil/776C85/5FU enhancer, Campto/Levamisole, Camptosar/Irinotecan, Tumodex/Ralitrexed, Leustatin/Cladribine, Paxex/Paclitaxel, Doxil/liposomal doxorubicin, Caelyx/liposomal doxorubicin, Fludara/Fludarabine, Pharmarubicin/Epirubicin, DepoCyt, ZD1839, LU 79553/Bis-Naphtalimide, LU 103793/Dolastain, Caetyx/liposomal doxorubicin, Gemzar/Gemcitabine, ZD 0473/Anormed, YM 116, Iodine seeds, CDK4 and CDK2 inhibitors, PARP inhibitors, D4809/Dexifosamide, Ifes/Mesnex/Ifosamide, Vumon/Teniposide, Paraplatin/Carboplatin, Plantinol/cisplatin, Vepeside/Etoposide, ZD 9331, Taxotere/Docetaxel, prodrug of guanine arabinoside, Taxane Analog, nitrosoureas, alkylating agents such as melphelan and cyclophosphamide, Aminoglutethimide, Asparaginase, Busulfan, Carboplatin, Chlorombucil, Cytarabine HCl, Dactinomycin, Daunorubicin HCl, Estramustine phosphate sodium, Etoposide (VP16-213), Floxuridine, Fluorouracil (5-FU), Flutamide, Hydroxyurea (hydroxycarbamide), Ifosfamide, Interferon Alfa-2a, Alfa-2b, Leuprolide acetate (LHRH-releasing factor analogue), Lomustine (CCNU), Mechlorethamine HCl (nitrogen mustard), Mercaptopurine, Mesna, Mitotane (o.p′-DDD), Mitoxantrone HCl, Octreotide, Plicamycin, Procarbazine HCl, Streptozocin, Tamoxifen citrate, Thioguanine, Thiotepa, Vinblastine sulfate, Amsacrine (m-AMSA), Azacitidine, Erthropoietin, Hexamethylmelamine (HMM), Interleukin 2, Mitoguazone (methyl-GAG; methyl glyoxal bis-guanylhydrazone; MGBG), Pentostatin (2′deoxycoformycin), Semustine (methyl-CCNU), Teniposide (VM-26) and Vindesine sulfate. Furthermore, the chemotherapeutic agent may be any of the chemotherapeutic agents mentioned in table 3 of U.S. Pat. No. 6,482,843 column 13 to 18.

[0475] The anti-cancer drug can in one preferred embodiment be selected from the group consisting of Aldesleukin/Proleukin (Chiron Corp), Alemtuzumab/Campath (Millennium and ILEX Partners, LP), alitretinoin/Panretin (Ligand Pharmaceuticals), allopurinol/Zyloprim (GlaxoSmithKline), altretamine/Hexylen (US Bioscience), amifostine/Ethyol (US Bioscience), anastrozole/Arimidex (AstraZeneca), arsenic trioxide/Trisenox (Cell Therapeutic), Asparaginase/Elspar (Merck & Co, Inc), BCG Live/TICE BCG (Organon Teknika Corp), bexarotene capsules/Targretin (Ligand Pharmaceuticals), bleomycin/Blenoxane (Bristol-Myers Squibb), busulfan/Busulfex (GlaxoSmithKline), calusterone/Methosarb (Pharmacia & Upjohn Company), capecitabine/Xeloda (Roche), carboplatin/Paraplatin (Bristol-Myers Squibb), carmustine/BCNU, BiCNU (Bristol-Myers Squibb), carmustine with Polifeprosan 20 Implant/Gliadel Wafer (Guilford Pharmaceuticals Inc.), celecoxib/Celebrex (Searle), chlorambucil/Leukeran (GlaxoSmithKline), cisplatin/Platinol (Bristol-Myers Squibb), cladribine/Leustatin, 2-CdA (R.W. Johnson Pharmaceutical Research Institute), cyclophosphamide Cytoxan/Neosar (Bristol-Myers Squibb), cytarabine/Cytosar-U (Pharmacia & Upjohn Company), dacarbazine/DTIC-Dome (Bayer), dactinomycin/actinomycin D Cosmegen (Merck), Darbepoetin alfa/Aranesp (Amgen, Inc), daunorubicin/daunomycin/Daunorubicin (Bedford Labs), daunorubicin/daunomycin/Cerubidine (Wyeth Ayerst), Denileukin/diftitox/Ontak (Seragen, Inc), dexrazoxane/Zinecard (Pharmacia & Upjohn Company), docetaxel/Taxotere (Aventis Pharmaceutical), doxorubicin Adriamycin/Rubex (Pharmacia & Upjohn Company), DROMOSTANOLONE PROPIONATE/MASTERONE INJECTION (SYNTEX), Elliott's B Solution (Orphan Medical, Inc), epirubicin/Ellence (Pharmacia & Upjohn Company), etoposide phosphate (Bristol-Myers Squibb), etoposide/VP-16/Vepesid (Bristol-Myers Squibb), exemestane/Aromasin (Pharmacia & Upjohn Company), Filgrastim/Neupogen (Amgen, Inc), floxuridine/FUDR (Roche), fludarabine/Fludara (Berlex Laboratories Inc.), fluorouracil/5-FU/Adrucil (ICN Puerto Rico), fulvestrant/Faslodex (IPR), gemcitabine/Gemzar (Eli Lilly), gemtuzumab/ozogamicin/Mylotarg (Wyeth Ayerst), goserelin acetate/Zoladex Implant (AstraZeneca Pharmaceuticals), hydroxyurea/Hydrea (Bristol-Myers Squibb), Ibritumomab Tiuxetan/Zevalin (IDEC Pharmaceuticals Corp), idarubicin/Idamycin (Adria Laboratories), ifosfamide/IFEX (Bristol-Myers Squibb), imatinib mesylate/Gleevec (Novartis), Interferon alfa-2a/Roferon-A (Hoffmann-La Roche Inc), Interferon alfa-2b/Intron A (Schering Corp), irinotecan/Camptosar (Pharmacia & Upjohn Company), letrozole/Femara (Novartis), leucovorin Wellcovorin/Leucovorin (Immunex Corporation), levamisole/Ergamisol (Janssen Research Foundation), lomustine/CCNU/CeeBU (Bristol-Myers Squibb), mechlorethamine/nitrogen mustard/Mustargen (Merck), megestrol acetate/Megace (Bristol-Myers Squibb), melphalan/L-PAM/Alkeran (GlaxoSmithKline), mercaptopurine/6-MP Purinethol (GlaxoSmithKline), mesna/Mesnex (Asta Medica), methotrexate (Lederle Laboratories), methoxsalen/Uvadex (Therakos), mitomycin C/Mutamycin (Bristol-Myers Squibb), mitomycin C/Mitozytrex (Supergen), mitotane/Lysodren (Bristol-Myers Squibb), mitoxantrone/Novantrone (Lederle Laboratories), nandrolone phenpropionate/Durabolin-50 (Organon), Nofetumomab/Verluma (Boehringer Ingelheim Pharma KG (formerly Dr. Karl Thomae GmbH)), Oprelvekin/Neumega (Genetics Institute), oxaliplatin/Eloxatin (Sanofi Synthelabo), paclitaxel/Taxol (Bristol-Myers Squibb), pamidronate/Aredia (Novartis), pegademase/Adagen (Pegademase Bovine) (Enzon), Pegaspargase/Oncaspar (Enzon, Inc), Pegfilgrastim/Neulasta (Amgen, Inc), pentostatin/Nipent (Parke-Davis Pharmaceutical Co.), pipobroman/Vercyte (Abbott Labs), plicamycin/mithramycin/Mithracin (Pfizer Labs), porfimer sodium/Photofrin (QLT Phototherapeutics Inc.), procarbazine/Matulane (Sigma Tau Pharms), quinacrine/Atabrine (Abbott Labs), Rasburicase/Elitek (Sanofi-Synthelabo, Inc), Rituximab/Rituxan (Genentech, Inc), Sargramostim/Prokine (Immunex Corp), streptozocin/Zanosar (Pharmacia & Upjohn Company), talc/Sclerosol (Bryan), tamoxifen/Nolvadex (AstraZeneca Pharmaceuticals), temozolomide/Temodar (Schering), teniposide/VM-26/Vumon (Bristol-Myers Squibb), testolactone/Teslac (Bristol-Myers Squibb), thioguanine/6-TG/Thioguanine (GlaxoSmithKline), thiotepa/Thioplex (Lederle Laboratories), topotecan/Hycamtin (GlaxoSmithKline), topotecan/Hycamtin (GlaxoSmithKline), toremifene/Fareston (Orion Corp), Tositumomab/Bexxar (Corixa Corporation), Trastuzumab/Herceptin (Genentech, Inc), tretinoin/ATRA/Vesanoid (Roche), Uracil Mustard (Roberts Labs), valrubicin/Valstar (Medeva), vinblastine/Velban (Eli Lilly), vincristine/Oncovin (Eli Lilly), vinorelbine/Navelbine (GlaxoSmithKline), and zoledronate/Zometa (Novartis).

[0476] The immunotherapeutic agent can be e.g. Ributaxin, Herceptin, Quadramet, Panorex, IDEC-Y2B8, BEC2, C225, Oncolym, SMART MI 95, ATRAGEN, Ovarex, Bexxar, LDP-03, ior t6, MDX-210, MDX-11, MDX-22, OV103, 3622W94, anti-VEGF, Zenapax, MDX-220, MDX-447, MELIMMUNE-2, MELIMMUNE-1, CEACIDE, Pretarget, NovoMAb-G2, TNT, Gliomab-H, GNI-250, EMD-72000, LymphoCide, CMA 676, Monopharm-C, 4B5, ior egf.r3, ior c5, BABS, anti-FLK-2, MDX-260, ANA Ab, SMART 1D10 Ab, SMART ABL 364 Ab and ImmuRAIT-CEA. Furthermore the immunotherapeutic agent may be any cytokine or interferon.

[0477] The therapeutic compositions or vaccine compositions of the invention can also be used in combination with other anti-cancer strategies, and such combination therapies are effective in inhibiting and/or eliminating tumor growth and metastasis. The methods of the present invention can advantageously be used with other treatment modalities, including, without limitation, radiation, surgery, gene therapy and chemotherapy.

[0478] The therapeutic compositions or vaccine compositions of the invention can also be used in combination with treatment of HIV. In one embodiment treatment of HIV includes administration of one or more of the drugs listed herein below.

[0479] There are five groups of antiretroviral drugs. Each of these groups attacks HIV in a different way.

| Antiretroviral drug class | Abbreviations | How they attack HIV |
|---|---|---|
| Nucleoside/Nucleotide Reverse | NRTIs, | NRTIs interfere with the action of an HIV |
| Transcriptase Inhibitors | nucleoside | protein called reverse transcriptase, |
| | analogues, | which the virus needs to make new |
| | nukes | copies of itself. |
| Non-Nucleoside Reverse | NNRTIs, | NNRTIs also stop HIV from replicating |
| Transcriptase Inhibitors | non-nucleosides, | within cells by inhibiting the reverse |
| | non-nukes | transcriptase protein. |
| Protease Inhibitors | PIs | PIs inhibit protease, which is another |
| | | protein involved in the HIV replication |
| | | process. |
| Fusion or Entry Inhibitors | | Fusion or entry inhibitors prevent HIV |
| | | from binding to or entering human |
| | | immune cells. |
| Integrase Inhibitors | | Integrase inhibitors interfere with the |
| | | integrase enzyme, which HIV needs to |
| | | insert its genetic material into human |
| | | cells. |

### Multi-Class Combinations:

| Combination | Brand name |
|---|---|
| Efavirenz + TDF + FTC | Atripla |
| d4T + 3TC + NVP | — |
| AZT + 3TC + NVP | — |

### Nucleoside/Nucleotide Reverse Transcriptase Inhibitors (NRTIs):

| | Generic | |
|---|---|---|
| Abbreviation | name | Brand name |
| 3TC | lamivudine | Epivir |
| ABC | abacavir | Ziagen |
| AZT or ZDV | Zidovudine | Retrovir |
| d4T | Stavudine | Zerit |
| ddC | Zalcitabine | Hivid |
| ddI | didanosine | Videx (tablet) |
| | | Videx EC |
| | | (capsule) |
| FTC | emtricitabine | Emtriva |
| TDF | tenofovir | Viread |

### Combined NRTIs:

| Combination | Brand name |
|---|---|
| ABC + 3TC | Epzicom (US) |
| | Kivexa (Europe) |
| ABC + AZT + 3TC | Trizivir |
| AZT + 3TC | Combivir |
| TDF + FTC | Truvada |
| d4T + 3TC | — |

### Non-Nucleoside Reverse Transcriptase Inhibitors (NNRTIs):

| Abbreviation | Generic name | Brand name |
|---|---|---|
| DLV | Delavirdine | Rescriptor |
| EFV | Efavirenz | Sustiva (US) |
| | | Stocrin (Europe) |
| ETR | Etravirine | Intelence |
| NVP | Nevirapine | Viramune |

### Protease Inhibitors (PIs):

| Abbreviation | Generic name | Brand name |
|---|---|---|
| APV | amprenavir | Agenerase |
| FOS-APV | fosamprenavir | Lexiva (US) |
| | | Telzir (Europe) |
| ATV | Atazanavir | Reyataz |
| DRV | Darunavir | Prezista |
| IDV | Indinavir | Crixivan |
| LPV/RTV | Iopinavir + | Kaletra |
| | ritonavir | Aluvia (developing world) |
| NFV | nelfinavir | Viracept |
| RTV | ritonavir | Norvir |
| SQV | saquinavir | Fortovase (soft gel capsule) |
| | | Invirase (hard gel capsule) |
| TPV | Tipranavir | Aptivus |

### Fusion or Entry Inhibitors:

| Abbreviation | Generic name | Brand Name |
|---|---|---|
| T-20 | Enfuvirtide | Fuzeon |
| MVC | maraviroc | Celsentri (Europe) |
| | | Selzentry (US) |

### Integrase Inhibitors:

| Abbreviation | Generic name | Brand Name |
|---|---|---|
| RAL | raltegravir | Isentress |

[0487] Other types of HIV treatments include administration of one or more of the following:
[0488] Atripla—(a single pill that includes efavirenz+tenofovir+FTC). People taking a first-line combination of efavirenz and Truvada, with an undetectable viral load for three months, can switch to Atripla
[0489] Atazanavir/r for first-line therapy is currently being researched, and the results are expected shortly. Atavanavir/r is widely used as first line treatment.
[0490] Darunavir/r was approved as a treatment for people with resistance. In a recent study, darunavir did better than Kaletra as first therapy.
[0491] Raltegravir—(an integrase inhibitor) has shown similar potency to efavirenz, but has fewer side effects or interactions with other drugs.
[0492] Maraviroc—(an entry inhibitor).
[0493] Etravirine—(a new NNRTI).

[0494] “Combination therapy” can include the introduction of heterologous nucleic acids into suitable cells, generally known as gene therapy. For example gene therapy may involve introduction of tumour suppressor genes or apoptosis promoting genes into tumour cells. Alternatively, nucleic acid sequences inhibiting expression of oncogenes or apoptosis inhibiting genes may be introduced to tumour cells. Furthermore, genes that encode enzymes capable of conferring to tumor cells sensitivity to chemotherapeutic agents may be introduced. Accordingly, the present invention in one embodiment provides a method comprising the step of treating cancer by introducing a gene vector, encoding a protein capable of enzymatically converting a prodrug, i.e., a non-toxic compound, into a toxic compound. In the method of the present invention, the therapeutic nucleic acid sequence is a nucleic acid coding for a product, wherein the product causes cell death by itself or in the presence of other drugs. A representative example of such a therapeutic nucleic acid is one, which codes for thymidine kinase of herpes simplex virus. Additional examples are thymidine kinase of varicella zoster virus and the bacterial gene cytosine deaminase, which can convert 5-fluorocytosine to the highly toxic compound 5-fluorouracil.

### Kit-of-Parts

[0495] A kit comprising a composition of the present invention is also provided. The kit can include a separate container containing a suitable vaccine enhancer, diluent or excipient, In addition, the kit can include instructions for mixing or combining ingredients and/or administration route/schemes.

### Detection of Vaccine Results

[0496] In one embodiment the present invention relates to use of the pharmamers according to the present invention such as MHC dextramers for use of detection of vaccine results. Detection of the vaccine response can comprise any method for immune monitoring know in the art including one or more assays described in PCT/DK/2008/050168, PCT/DK2008/050167 and PA 2008 01035. PCT/DK/2008/050168, PCT/DK2008/050167 and PA 2008 01035 are hereby incorporated by reference in there entirety in this application.

[0497] In one embodiment a blood sample such as peripheral blood is obtained from a patient before vaccination and subsequent to a series of vaccinations. In order to identify peptide-specific T-cell precursors, periferal blood lymphocytes (PBL) are used e.g. directly in ELISPOT (designated direct ELISPOT) or any other relevant assay know in the art such as ELISA.

[0498] In one aspect the invention relates to methods of monitoring immunisation, said method comprising the steps of
[0499] i) providing a blood sample from an individual
[0500] ii) providing a peptide or pharmamer of the present invention
[0501] iii) determining whether said blood sample comprises antibodies or T-cells comprising T-cell receptors specifically binding the peptide or pharmamer of the present invention
[0502] iv) thereby determining whether an immune response to said peptide or pharmamer has been raised in said individual.

[0503] Use of the pharmamers of the present invention for immune monitoring assays such as MHC multimer assays, ELISPOT, CFC and other assays involving formation of MHC-peptide complexes are also part of the present invention.

[0504] There is, in still further aspects, provided a diagnostic kit for ex vivo or in situ diagnosis of the presence specific T cells among PBLs or in tissue such as tumour tissue comprising one or more peptides or one or more pharmamers of the invention, and a method of detecting in a patient the presence of such reactive T cells, the method comprising contacting a tissue or a blood sample with a complex of a peptide of the invention and e.g. a Class I HLA molecule or a fragment of such molecule and detecting binding of the complex to the tissue or the blood cells.

### Pharmamers Comprising Peptide Sequences

[0505] In one embodiment the present invention relates to pharmamers comprising one or more peptides. The peptides can in one embodiment be defined as outlined in the items herein below. It is to be understood that said items are not meant to be limiting to the peptide according to the present invention in that said peptide may consist of more than said 8 to 16 amino acids, but at least comprising said 8 to 16 amino acids.

[0506] Thus, in one embodiment of the present invention, the peptide may be a fragment or part of a larger protein, wherein the larger protein may be of a total length of 17, such as 18, for example 19, such as 20, for example 21, such as 22, for example 23, such as 24, for example 25, such as 26, for example 27, such as 28, for example 29, such as 30, for example 31, such as 32, for example 33, such as 34, for example 35, such as 36, for example 37, such as 38, for example 39, such as 40 amino acids, wherein 8 to 16 of said amino acids are defined in the items below. In another embodiment, the larger protein may be of a total length of between 20 to 30, such as 30-40, for example 40-50, such as 50-60, for example 60-70, such as 70-80, for example 80-90, such as 90-100, for example 100-150, such as 150-200, for example 200-250, such as 250-300, for example 300-500, such as 500-1000, for example 1000-2000, such as 2000-3000, for example 3000-4000, such as 4000-5000, for example 5000-10,000, such as 10,000-20,000, for example 20,000-30,000, such as 30,000-40,000, for example 40,000-50,000, such as 50,000-75,000, for example 75,000-100,000, such as 100,000-250,000, for example 250,000-500,000, such as 500,000-1,000,000 amino acids.

[0507] It is also to be understood, that the co-translational and post-translational modifications may occur either individually or in combination, on the same or different amino acid residues. Thus, in one embodiment, any one amino acid may be modified once, twice or three times with the same or different types of modifications. Furthermore, said identical and/or different modification may be present on 1, 2, 3, 4, 5, 6, 7, 8, 9, 10, 11, 12, 13, 14, 15, 16, 17 or 18 of the amino acid residues of the peptide according to the present invention as defined in the items below in ‘the first set of items’. In addition, modifications may also be present on amino acid residues outside said 8 to 16 amino acids, in case the peptide is part of a larger protein.

### First Set of Items

[0508] 1. A peptide of between 8 to 16 consecutive amino acids, comprising at least 8 of amino acid number X₁-X₂-X₃-X₄-X₅-X₆-X₇-X₈-X₉-X₁₀-X₁₁-X₁₂-X₁₃-X₁₄-X₁₅-X₁₆
[0509] 2. The peptide according to item 1, wherein X₁ is alanine
[0510] 3. The peptide according to item 1, wherein X₁ is arginine
[0511] 4. The peptide according to item 1, wherein X₁ is asparagine
[0512] 5. The peptide according to item 1, wherein X₁ is aspartic acid
[0513] 6. The peptide according to item 1, wherein X₁ is cysteine
[0514] 7. The peptide according to item 1, wherein X₁ is glutamic acid
[0515] 8. The peptide according to item 1, wherein X₁ is glutamine
[0516] 9. The peptide according to item 1, wherein X₁ is glycine
[0517] 10. The peptide according to item 1, wherein X₁ is histidine
[0518] 11. The peptide according to item 1, wherein X₁ is isoleucine
[0519] 12. The peptide according to item 1, wherein X₁ is leucine
[0520] 13. The peptide according to item 1, wherein X₁ is lysine
[0521] 14. The peptide according to item 1, wherein X₁ is methionine
[0522] 15. The peptide according to item 1, wherein X₁ is phenylalanine
[0523] 16. The peptide according to item 1, wherein X₁ is proline
[0524] 17. The peptide according to item 1, wherein X₁ is serine
[0525] 18. The peptide according to item 1, wherein X₁ is threonine
[0526] 19. The peptide according to item 1, wherein X₁ is tryptophan
[0527] 20. The peptide according to item 1, wherein X₁ is tyrosine
[0528] 21. The peptide according to item 1, wherein X₁ is valine
[0529] 22. The peptide according to item 1, wherein X₂ is alanine
[0530] 23. The peptide according to item 1, wherein X₂ is arginine
[0531] 24. The peptide according to item 1, wherein X₂ is asparagine
[0532] 25. The peptide according to item 1, wherein X₂ is aspartic acid
[0533] 26. The peptide according to item 1, wherein X₂ is cysteine
[0534] 27. The peptide according to item 1, wherein X₂ is glutamic acid
[0535] 28. The peptide according to item 1, wherein X₂ is glutamine
[0536] 29. The peptide according to item 1, wherein X₂ is glycine
[0537] 30. The peptide according to item 1, wherein X₂ is histidine
[0538] 31. The peptide according to item 1, wherein X₂ is isoleucine
[0539] 32. The peptide according to item 1, wherein X₂ is leucine
[0540] 33. The peptide according to item 1, wherein X₂ is lysine
[0541] 34. The peptide according to item 1, wherein X₂ is methionine
[0542] 35. The peptide according to item 1, wherein X₂ is phenylalanine
[0543] 36. The peptide according to item 1, wherein X₂ is proline
[0544] 37. The peptide according to item 1, wherein X₂ is serine
[0545] 38. The peptide according to item 1, wherein X₂ is threonine
[0546] 39. The peptide according to item 1, wherein X₂ is tryptophan
[0547] 40. The peptide according to item 1, wherein X₂ is tyrosine
[0548] 41. The peptide according to item 1, wherein X₂ is valine
[0549] 42. The peptide according to item 1, wherein X₃ is alanine
[0550] 43. The peptide according to item 1, wherein X₃ is arginine
[0551] 44. The peptide according to item 1, wherein X₃ is asparagine
[0552] 45. The peptide according to item 1, wherein X₃ is aspartic acid
[0553] 46. The peptide according to item 1, wherein X₃ is cysteine
[0554] 47. The peptide according to item 1, wherein X₃ is glutamic acid
[0555] 48. The peptide according to item 1, wherein X₃ is glutamine
[0556] 49. The peptide according to item 1, wherein X₃ is glycine
[0557] 50. The peptide according to item 1, wherein X₃ is histidine
[0558] 51. The peptide according to item 1, wherein X₃ is isoleucine
[0559] 52. The peptide according to item 1, wherein X₃ is leucine
[0560] 53. The peptide according to item 1, wherein X₃ is lysine
[0561] 54. The peptide according to item 1, wherein X₃ is methionine
[0562] 55. The peptide according to item 1, wherein X₃ is phenylalanine
[0563] 56. The peptide according to item 1, wherein X₃ is proline
[0564] 57. The peptide according to item 1, wherein X₃ is serine
[0565] 58. The peptide according to item 1, wherein X₃ is threonine
[0566] 59. The peptide according to item 1, wherein X₃ is tryptophan
[0567] 60. The peptide according to item 1, wherein X₃ is tyrosine
[0568] 61. The peptide according to item 1, wherein X₃ is valine
[0569] 62. The peptide according to item 1, wherein X₄ is alanine
[0570] 63. The peptide according to item 1, wherein X₄ is arginine
[0571] 64. The peptide according to item 1, wherein X₄ is asparagine
[0572] 65. The peptide according to item 1, wherein X₄ is aspartic acid
[0573] 66. The peptide according to item 1, wherein X₄ is cysteine
[0574] 67. The peptide according to item 1, wherein X₄ is glutamic acid
[0575] 68. The peptide according to item 1, wherein X₄ is glutamine
[0576] 69. The peptide according to item 1, wherein X₄ is glycine
[0577] 70. The peptide according to item 1, wherein X₄ is histidine
[0578] 71. The peptide according to item 1, wherein X₄ is isoleucine
[0579] 72. The peptide according to item 1, wherein X₄ is leucine
[0580] 73. The peptide according to item 1, wherein X₄ is lysine
[0581] 74. The peptide according to item 1, wherein X₄ is methionine
[0582] 75. The peptide according to item 1, wherein X₄ is phenylalanine
[0583] 76. The peptide according to item 1, wherein X₄ is proline
[0584] 77. The peptide according to item 1, wherein X₄ is serine
[0585] 78. The peptide according to item 1, wherein X₄ is threonine
[0586] 79. The peptide according to item 1, wherein X₄ is tryptophan
[0587] 80. The peptide according to item 1, wherein X₄ is tyrosine
[0588] 81. The peptide according to item 1, wherein X₄ is valine
[0589] 82. The peptide according to item 1, wherein X₅ is alanine
[0590] 83. The peptide according to item 1, wherein X₅ is arginine
[0591] 84. The peptide according to item 1, wherein X₅ is asparagine
[0592] 85. The peptide according to item 1, wherein X₅ is aspartic acid
[0593] 86. The peptide according to item 1, wherein X₅ is cysteine
[0594] 87. The peptide according to item 1, wherein X₅ is glutamic acid
[0595] 88. The peptide according to item 1, wherein X₅ is glutamine
[0596] 89. The peptide according to item 1, wherein X₅ is glycine
[0597] 90. The peptide according to item 1, wherein X₅ is histidine
[0598] 91. The peptide according to item 1, wherein X₅ is isoleucine
[0599] 92. The peptide according to item 1, wherein X₅ is leucine
[0600] 93. The peptide according to item 1, wherein X₅ is lysine
[0601] 94. The peptide according to item 1, wherein X₅ is methionine
[0602] 95. The peptide according to item 1, wherein X₅ is phenylalanine
[0603] 96. The peptide according to item 1, wherein X₅ is proline
[0604] 97. The peptide according to item 1, wherein X₅ is serine
[0605] 98. The peptide according to item 1, wherein X₅ is threonine
[0606] 99. The peptide according to item 1, wherein X₅ is tryptophan
[0607] 100. The peptide according to item 1, wherein X₅ is tyrosine
[0608] 101. The peptide according to item 1, wherein X₅ is valine
[0609] 102. The peptide according to item 1, wherein X₆ is alanine
[0610] 103. The peptide according to item 1, wherein X₆ is arginine
[0611] 104. The peptide according to item 1, wherein X₆ is asparagine
[0612] 105. The peptide according to item 1, wherein X₆ is aspartic acid
[0613] 106. The peptide according to item 1, wherein X₆ is cysteine
[0614] 107. The peptide according to item 1, wherein X₆ is glutamic acid
[0615] 108. The peptide according to item 1, wherein X₆ is glutamine
[0616] 109. The peptide according to item 1, wherein X₆ is glycine
[0617] 110. The peptide according to item 1, wherein X₆ is histidine
[0618] 111. The peptide according to item 1, wherein X₆ is isoleucine
[0619] 112. The peptide according to item 1, wherein X₆ is leucine
[0620] 113. The peptide according to item 1, wherein X₆ is lysine
[0621] 114. The peptide according to item 1, wherein X₆ is methionine
[0622] 115. The peptide according to item 1, wherein X₆ is phenylalanine
[0623] 116. The peptide according to item 1, wherein X₆ is proline
[0624] 117. The peptide according to item 1, wherein X₆ is serine
[0625] 118. The peptide according to item 1, wherein X₆ is threonine
[0626] 119. The peptide according to item 1, wherein X₆ is tryptophan
[0627] 120. The peptide according to item 1, wherein X₆ is tyrosine
[0628] 121. The peptide according to item 1, wherein X₆ is valine
[0629] 122. The peptide according to item 1, wherein X₇ is alanine
[0630] 123. The peptide according to item 1, wherein X₇ is arginine
[0631] 124. The peptide according to item 1, wherein X₇ is asparagine
[0632] 125. The peptide according to item 1, wherein X₇ is aspartic acid
[0633] 126. The peptide according to item 1, wherein X₇ is cysteine
[0634] 127. The peptide according to item 1, wherein X₇ is glutamic acid
[0635] 128. The peptide according to item 1, wherein X₇ is glutamine
[0636] 129. The peptide according to item 1, wherein X₇ is glycine
[0637] 130. The peptide according to item 1, wherein X₇ is histidine
[0638] 131. The peptide according to item 1, wherein X₇ is isoleucine
[0639] 132. The peptide according to item 1, wherein X₇ is leucine
[0640] 133. The peptide according to item 1, wherein X₇ is lysine
[0641] 134. The peptide according to item 1, wherein X₇ is methionine
[0642] 135. The peptide according to item 1, wherein X₇ is phenylalanine
[0643] 136. The peptide according to item 1, wherein X₇ is proline
[0644] 137. The peptide according to item 1, wherein X₇ is serine
[0645] 138. The peptide according to item 1, wherein X₇ is threonine
[0646] 139. The peptide according to item 1, wherein X₇ is tryptophan
[0647] 140. The peptide according to item 1, wherein X₇ is tyrosine
[0648] 141. The peptide according to item 1, wherein X₇ is valine
[0649] 142. The peptide according to item 1, wherein X₈ is alanine
[0650] 143. The peptide according to item 1, wherein X₈ is arginine
[0651] 144. The peptide according to item 1, wherein X₈ is asparagine
[0652] 145. The peptide according to item 1, wherein X₈ is aspartic acid
[0653] 146. The peptide according to item 1, wherein X₈ is cysteine
[0654] 147. The peptide according to item 1, wherein X₈ is glutamic acid
[0655] 148. The peptide according to item 1, wherein X₈ is glutamine
[0656] 149. The peptide according to item 1, wherein X₈ is glycine
[0657] 150. The peptide according to item 1, wherein X₈ is an histidine
[0658] 151. The peptide according to item 1, wherein X₈ is isoleucine
[0659] 152. The peptide according to item 1, wherein X₈ is leucine
[0660] 153. The peptide according to item 1, wherein X₈ is lysine
[0661] 154. The peptide according to item 1, wherein X₈ is methionine
[0662] 155. The peptide according to item 1, wherein X₈ is phenylalanine
[0663] 156. The peptide according to item 1, wherein X₈ is proline
[0664] 157. The peptide according to item 1, wherein X₈ is serine
[0665] 158. The peptide according to item 1, wherein X₈ is threonine
[0666] 159. The peptide according to item 1, wherein X₈ is tryptophan
[0667] 160. The peptide according to item 1, wherein X₈ is tyrosine
[0668] 161. The peptide according to item 1, wherein X₈ is valine
[0669] 162. The peptide according to item 1, wherein X₉ is alanine
[0670] 163. The peptide according to item 1, wherein X₉ is arginine
[0671] 164. The peptide according to item 1, wherein X₉ is asparagine
[0672] 165. The peptide according to item 1, wherein X₉ is aspartic acid
[0673] 166. The peptide according to item 1, wherein X₉ is cysteine
[0674] 167. The peptide according to item 1, wherein X₉ is glutamic acid
[0675] 168. The peptide according to item 1, wherein X₉ is glutamine
[0676] 169. The peptide according to item 1, wherein X₉ is glycine
[0677] 170. The peptide according to item 1, wherein X₉ is an histidine
[0678] 171. The peptide according to item 1, wherein X₉ is isoleucine
[0679] 172. The peptide according to item 1, wherein X₉ is leucine
[0680] 173. The peptide according to item 1, wherein X₉ is lysine
[0681] 174. The peptide according to item 1, wherein X₉ is methionine
[0682] 175. The peptide according to item 1, wherein X₉ is phenylalanine
[0683] 176. The peptide according to item 1, wherein X₉ is proline
[0684] 177. The peptide according to item 1, wherein X₉ is serine
[0685] 178. The peptide according to item 1, wherein X₉ is threonine
[0686] 179. The peptide according to item 1, wherein X₉ is tryptophan
[0687] 180. The peptide according to item 1, wherein X₉ is tyrosine
[0688] 181. The peptide according to item 1, wherein X₉ is valine
[0689] 182. The peptide according to item 1, wherein X₉ is alanine
[0690] 183. The peptide according to item 1, wherein X₉ is arginine
[0691] 184. The peptide according to item 1, wherein X₉ is asparagine
[0692] 185. The peptide according to item 1, wherein X₉ is aspartic acid
[0693] 186. The peptide according to item 1, wherein X₉ is cysteine
[0694] 187. The peptide according to item 1, wherein X₉ is glutamic acid
[0695] 188. The peptide according to item 1, wherein X₉ is glutamine
[0696] 189. The peptide according to item 1, wherein X₉ is glycine
[0697] 190. The peptide according to item 1, wherein X₉ is an histidine
[0698] 191. The peptide according to item 1, wherein X₉ is isoleucine
[0699] 192. The peptide according to item 1, wherein X₉ is leucine
[0700] 193. The peptide according to item 1, wherein X₉ is lysine
[0701] 194. The peptide according to item 1, wherein X₉ is methionine
[0702] 195. The peptide according to item 1, wherein X₉ is phenylalanine
[0703] 196. The peptide according to item 1, wherein X₉ is proline
[0704] 197. The peptide according to item 1, wherein X₉ is serine
[0705] 198. The peptide according to item 1, wherein X₉ is threonine
[0706] 199. The peptide according to item 1, wherein X₉ is tryptophan
[0707] 200. The peptide according to item 1, wherein X₉ is tyrosine
[0708] 201. The peptide according to item 1, wherein X₉ is valine
[0709] 202. The peptide according to item 1, wherein X₁₀ is alanine
[0710] 203. The peptide according to item 1, wherein X₁₀ is arginine
[0711] 204. The peptide according to item 1, wherein X₁₀ is asparagine
[0712] 205. The peptide according to item 1, wherein X₁₀ is aspartic acid
[0713] 206. The peptide according to item 1, wherein X₁₀ is cysteine
[0714] 207. The peptide according to item 1, wherein X₁₀ is glutamic acid
[0715] 208. The peptide according to item 1, wherein X₁₀ is glutamine
[0716] 209. The peptide according to item 1, wherein X₁₀ is glycine
[0717] 210. The peptide according to item 1, wherein X₁₀ is an histidine
[0718] 211. The peptide according to item 1, wherein X₁₀ is isoleucine
[0719] 212. The peptide according to item 1, wherein X₁₀ is leucine
[0720] 213. The peptide according to item 1, wherein X₁₀ is lysine
[0721] 214. The peptide according to item 1, wherein X₁₀ is methionine
[0722] 215. The peptide according to item 1, wherein X₁₀ is phenylalanine
[0723] 216. The peptide according to item 1, wherein X₁₀ is proline
[0724] 217. The peptide according to item 1, wherein X₁₀ is serine
[0725] 218. The peptide according to item 1, wherein X₁₀ is threonine
[0726] 219. The peptide according to item 1, wherein X₁₀ is tryptophan
[0727] 220. The peptide according to item 1, wherein X₁₀ is tyrosine
[0728] 221. The peptide according to item 1, wherein X₁₀ is valine
[0729] 222. The peptide according to item 1, wherein X₁₁ is alanine
[0730] 223. The peptide according to item 1, wherein X₁₁ is arginine
[0731] 224. The peptide according to item 1, wherein X₁₁ is asparagine
[0732] 225. The peptide according to item 1, wherein X₁₁ is aspartic acid
[0733] 226. The peptide according to item 1, wherein X₁₁ is cysteine
[0734] 227. The peptide according to item 1, wherein X₁₁ is glutamic acid
[0735] 228. The peptide according to item 1, wherein X₁₁ is glutamine
[0736] 229. The peptide according to item 1, wherein X₁₁ is glycine
[0737] 230. The peptide according to item 1, wherein X₁₁ is an histidine
[0738] 231. The peptide according to item 1, wherein X₁₁ is isoleucine
[0739] 232. The peptide according to item 1, wherein X₁₁ is leucine
[0740] 233. The peptide according to item 1, wherein X₁₁ is lysine
[0741] 234. The peptide according to item 1, wherein X₁₁ is methionine
[0742] 235. The peptide according to item 1, wherein X₁₁ is phenylalanine
[0743] 236. The peptide according to item 1, wherein X₁₁ is proline
[0744] 237. The peptide according to item 1, wherein X₁₁ is serine
[0745] 238. The peptide according to item 1, wherein X₁₁ is threonine
[0746] 239. The peptide according to item 1, wherein X₁₁ is tryptophan
[0747] 240. The peptide according to item 1, wherein X₁₁ is tyrosine
[0748] 241. The peptide according to item 1, wherein X₁₁ is valine
[0749] 242. The peptide according to item 1, wherein X₁₂ is alanine
[0750] 243. The peptide according to item 1, wherein X₁₂ is arginine
[0751] 244. The peptide according to item 1, wherein X₁₂ is asparagine
[0752] 245. The peptide according to item 1, wherein X₁₂ is aspartic acid
[0753] 246. The peptide according to item 1, wherein X₁₂ is cysteine
[0754] 247. The peptide according to item 1, wherein X₁₂ is glutamic acid
[0755] 248. The peptide according to item 1, wherein X₁₂ is glutamine
[0756] 249. The peptide according to item 1, wherein X₁₂ is glycine
[0757] 250. The peptide according to item 1, wherein X₁₂ is histidine
[0758] 251. The peptide according to item 1, wherein X₁₂ is isoleucine
[0759] 252. The peptide according to item 1, wherein X₁₂ is leucine
[0760] 253. The peptide according to item 1, wherein X₁₂ is lysine
[0761] 254. The peptide according to item 1, wherein X₁₂ is methionine
[0762] 255. The peptide according to item 1, wherein X₁₂ is phenylalanine
[0763] 256. The peptide according to item 1, wherein X₁₂ is proline
[0764] 257. The peptide according to item 1, wherein X₁₂ is serine
[0765] 258. The peptide according to item 1, wherein X₁₂ is threonine
[0766] 259. The peptide according to item 1, wherein X₁₂ is tryptophan
[0767] 260. The peptide according to item 1, wherein X₁₂ is tyrosine
[0768] 261. The peptide according to item 1, wherein X₁₂ is valine
[0769] 262. The peptide according to item 1, wherein X₁₃ is alanine
[0770] 263. The peptide according to item 1, wherein X₁₃ is arginine
[0771] 264. The peptide according to item 1, wherein X₁₃ is asparagine
[0772] 265. The peptide according to item 1, wherein X₁₃ is aspartic acid
[0773] 266. The peptide according to item 1, wherein X₁₃ is cysteine
[0774] 267. The peptide according to item 1, wherein X₁₃ is glutamic acid
[0775] 268. The peptide according to item 1, wherein X₁₃ is glutamine
[0776] 269. The peptide according to item 1, wherein X₁₃ is glycine
[0777] 270. The peptide according to item 1, wherein X₁₃ is histidine
[0778] 271. The peptide according to item 1, wherein X₁₃ is isoleucine
[0779] 272. The peptide according to item 1, wherein X₁₃ is leucine
[0780] 273. The peptide according to item 1, wherein X₁₃ is lysine
[0781] 274. The peptide according to item 1, wherein X₁₃ is methionine
[0782] 275. The peptide according to item 1, wherein X₁₃ is phenylalanine
[0783] 276. The peptide according to item 1, wherein X₁₃ is proline
[0784] 277. The peptide according to item 1, wherein X₁₃ is serine
[0785] 278. The peptide according to item 1, wherein X₁₃ is threonine
[0786] 279. The peptide according to item 1, wherein X₁₃ is tryptophan
[0787] 280. The peptide according to item 1, wherein X₁₃ is tyrosine
[0788] 281. The peptide according to item 1, wherein X₁₃ is valine
[0789] 282. The peptide according to item 1, wherein X₁₄ is alanine
[0790] 283. The peptide according to item 1, wherein X₁₄ is arginine
[0791] 284. The peptide according to item 1, wherein X₁₄ is asparagine
[0792] 285. The peptide according to item 1, wherein X₁₄ is aspartic acid
[0793] 286. The peptide according to item 1, wherein X₁₄ is cysteine
[0794] 287. The peptide according to item 1, wherein X₁₄ is glutamic acid
[0795] 288. The peptide according to item 1, wherein X₁₄ is glutamine
[0796] 289. The peptide according to item 1, wherein X₁₄ is glycine
[0797] 290. The peptide according to item 1, wherein X₁₄ is histidine
[0798] 291. The peptide according to item 1, wherein X₁₄ is isoleucine
[0799] 292. The peptide according to item 1, wherein X₁₄ is leucine
[0800] 293. The peptide according to item 1, wherein X₁₄ is lysine
[0801] 294. The peptide according to item 1, wherein X₁₄ is methionine
[0802] 295. The peptide according to item 1, wherein X₁₄ is phenylalanine
[0803] 296. The peptide according to item 1, wherein X₁₄ is proline
[0804] 297. The peptide according to item 1, wherein X₁₄ is serine
[0805] 298. The peptide according to item 1, wherein X₁₄ is threonine
[0806] 299. The peptide according to item 1, wherein X₁₄ is tryptophan
[0807] 300. The peptide according to item 1, wherein X₁₄ is tyrosine
[0808] 301. The peptide according to item 1, wherein X₁₄ is valine
[0809] 302. The peptide according to item 1, wherein X₁₅ is alanine
[0810] 303. The peptide according to item 1, wherein X₁₅ is arginine
[0811] 304. The peptide according to item 1, wherein X₁₅ is asparagine
[0812] 305. The peptide according to item 1, wherein X₁₅ is aspartic acid
[0813] 306. The peptide according to item 1, wherein X₁₅ is cysteine
[0814] 307. The peptide according to item 1, wherein X₁₅ is glutamic acid
[0815] 308. The peptide according to item 1, wherein X₁₅ is glutamine
[0816] 309. The peptide according to item 1, wherein X₁₅ is glycine
[0817] 310. The peptide according to item 1, wherein X₁₅ is histidine
[0818] 311. The peptide according to item 1, wherein X₁₅ is isoleucine
[0819] 312. The peptide according to item 1, wherein X₁₅ is leucine
[0820] 313. The peptide according to item 1, wherein X₁₅ is lysine
[0821] 314. The peptide according to item 1, wherein X₁₅ is methionine
[0822] 315. The peptide according to item 1, wherein X₁₅ is phenylalanine
[0823] 316. The peptide according to item 1, wherein X₁₅ is proline
[0824] 317. The peptide according to item 1, wherein X₁₅ is serine
[0825] 318. The peptide according to item 1, wherein X₁₅ is threonine
[0826] 319. The peptide according to item 1, wherein X₁₅ is tryptophan
[0827] 320. The peptide according to item 1, wherein X₁₅ is tyrosine
[0828] 321. The peptide according to item 1, wherein X₁₅ is valine
[0829] 322. The peptide according to item 1, wherein X₁₆ is alanine
[0830] 323. The peptide according to item 1, wherein X₁₆ is arginine
[0831] 324. The peptide according to item 1, wherein X₁₆ is asparagine
[0832] 325. The peptide according to item 1, wherein X₁₆ is aspartic acid
[0833] 326. The peptide according to item 1, wherein X₁₆ is cysteine
[0834] 327. The peptide according to item 1, wherein X₁₆ is glutamic acid
[0835] 328. The peptide according to item 1, wherein X₁₆ is glutamine
[0836] 329. The peptide according to item 1, wherein X₁₆ is glycine
[0837] 330. The peptide according to item 1, wherein X₁₆ is histidine
[0838] 331. The peptide according to item 1, wherein X₁₆ is isoleucine
[0839] 332. The peptide according to item 1, wherein X₁₆ is leucine
[0840] 333. The peptide according to item 1, wherein X₁₆ is lysine
[0841] 334. The peptide according to item 1, wherein X₁₆ is methionine
[0842] 335. The peptide according to item 1, wherein X₁₆ is phenylalanine
[0843] 336. The peptide according to item 1, wherein X₁₆ is proline
[0844] 337. The peptide according to item 1, wherein X₁₆ is serine
[0845] 338. The peptide according to item 1, wherein X₁₆ is threonine
[0846] 339. The peptide according to item 1, wherein X₁₆ is tryptophan
[0847] 340. The peptide according to item 1, wherein X₁₆ is tyrosine
[0848] 341. The peptide according to item 1, wherein X₁₆ is valine
[0849] 342. The peptide according to any of items 2, 22, 42, 62, 82, 102, 122, 142, 162, 182, 202, 222, 242, 262, 282, 302 or 322, wherein the alanine is D-alanine
[0850] 343. The peptide according to any of items 2, 22, 42, 62, 82, 102, 122, 142, 162, 182, 202, 222, 242, 262, 282, 302 or 322, wherein the alanine is L-alanine
[0851] 344. The peptide according to any of items 3, 23, 43, 63, 83, 103, 123, 143, 163, 183, 203, 223, 243, 263, 283, 303 or 323, wherein the arginine is D-arginine
[0852] 345. The peptide according to any of items 3, 23, 43, 63, 83, 103, 123, 143, 163, 183, 203, 223, 243, 263, 283, 303 or 323, wherein the arginine is L-arginine
[0853] 346. The peptide according to any of items 4, 24, 44, 64, 84, 104, 124, 144, 164, 184, 204, 224, 244, 264, 284, 304 or 324, wherein the asparagine is D-asparagine
[0854] 347. The peptide according to any of items 4, 24, 44, 64, 84, 104, 124, 144, 164, 184, 204, 224, 244, 264, 284, 304 or 324, wherein the asparagine is L-asparagine
[0855] 348. The peptide according to any of items 5, 25, 45, 65, 85, 105, 125, 145, 165, 185, 205, 225, 245, 265, 285, 305 or 325, wherein the aspartic acid is D-aspartic acid
[0856] 349. The peptide according to any of items 5, 25, 45, 65, 85, 105, 125, 145, 165, 185, 205, 225, 245, 265, 285, 305 or 325, wherein the aspartic acid is L-aspartic acid
[0857] 350. The peptide according to any of items 6, 26, 46, 66, 86, 106, 126, 146, 166, 186, 206, 226, 246, 266, 286, 306 or 326, wherein the cysteine is D-cysteine
[0858] 351. The peptide according to any of items 6, 26, 46, 66, 86, 106, 126, 146, 166, 186, 206, 226, 246, 266, 286, 306 or 326, wherein the cysteine is L-cysteine
[0859] 352. The peptide according to any of items 7, 27, 47, 67, 87, 107, 127, 147, 167, 187, 207, 227, 247, 267, 287, 307 or 327, wherein the glutamic acid is D-glutamic acid
[0860] 353. The peptide according to any of items 7, 27, 47, 67, 87, 107, 127, 147, 167, 187, 207, 227, 247, 267, 287, 307 or 327, wherein the glutamic acid is L-glutamic acid
[0861] 354. The peptide according to any of items 8, 28, 48, 68, 88, 108, 128, 148, 168, 188, 208, 228, 248, 268, 288, 308 or 328, wherein the glutamine is D-glutamine
[0862] 355. The peptide according to any of items 8, 28, 48, 68, 88, 108, 128, 148, 168, 188, 208, 228, 248, 268, 288, 308 or 328, wherein the glutamine is L-glutamine
[0863] 356. The peptide according to any of items 9, 29, 49, 69, 89, 109, 129, 149, 169, 189, 209, 229, 249, 269, 289, 309 or 329, wherein the glycine is D-glycine
[0864] 357. The peptide according to any of items 9, 29, 49, 69, 89, 109, 129, 149, 169, 189, 209, 229, 249, 269, 289, 309 or 329, wherein the glycine is L-glycine
[0865] 358. The peptide according to any of items 10, 30, 50, 70, 90, 110, 130, 150, 170, 190, 210, 230, 250, 270, 290, 310 or 330, wherein the histidine is D-histidine
[0866] 359. The peptide according to any of items 10, 30, 50, 70, 90, 110, 130, 150, 170, 190, 210, 230, 250, 270, 290, 310 or 330, wherein the histidine is L-histidine
[0867] 360. The peptide according to any of items 11, 31, 51, 71, 91, 111, 131, 151, 171, 191, 211, 231, 251, 271, 291, 311 or 331, wherein the isoleucine is D-isoleucine
[0868] 361. The peptide according to any of items 11, 31, 51, 71, 91, 111, 131, 151, 171, 191, 211, 231, 251, 271, 291, 311 or 331, wherein the isoleucine is L-isoleucine
[0869] 362. The peptide according to any of items 12, 32, 52, 72, 92, 112, 132, 152, 172, 192, 212, 232, 252, 272, 292, 312 or 332, wherein the leucine is D-leucine
[0870] 363. The peptide according to any of items 12, 32, 52, 72, 92, 112, 132, 152, 172, 192, 212, 232, 252, 272, 292, 312 or 332, wherein the leucine is L-leucine
[0871] 364. The peptide according to any of items 13, 33, 53, 73, 93, 113, 133, 153, 173, 193, 213, 233, 253, 273, 293, 313 or 333, wherein the lysine is D-lysine
[0872] 365. The peptide according to any of items 13, 33, 53, 73, 93, 113, 133, 153, 173, 193, 213, 233, 253, 273, 293, 313 or 333, wherein the lysine is L-lysine
[0873] 366. The peptide according to any of items 14, 34, 54, 74, 94, 114, 134, 154, 174, 194, 214, 234, 254, 274, 294, 314 or 334, wherein the methionine is D-methionine
[0874] 367. The peptide according to any of items 14, 34, 54, 74, 94, 114, 134, 154, 174, 194, 214, 234, 254, 274, 294, 314 or 334, wherein the methionine is L-methionine
[0875] 368. The peptide according to any of items 15, 35, 55, 75, 95, 115, 135, 155, 175, 195, 215, 235, 255, 275, 295, 315 or 335, wherein the phenylalanine is D-phenylalanine
[0876] 369. The peptide according to any of items 15, 35, 55, 75, 95, 115, 135, 155, 175, 195, 215, 235, 255, 275, 295, 315 or 335, wherein the phenylalanine is L-phenylalanine
[0877] 370. The peptide according to any of items 16, 36, 56, 76, 96, 116, 136, 156, 176, 196, 216, 236, 256, 276, 296, 316 or 336, wherein the proline is D-proline
[0878] 371. The peptide according to any of items 16, 36, 56, 76, 96, 116, 136, 156, 176, 196, 216, 236, 256, 276, 296, 316 or 336, wherein the proline is L-proline
[0879] 372. The peptide according to any of items 17, 37, 57, 77, 97, 117, 137, 157, 177, 197, 217, 237, 257, 277, 297, 317 or 337, wherein the serine is D-serine
[0880] 373. The peptide according to any of items 17, 37, 57, 77, 97, 117, 137, 157, 177, 197, 217, 237, 257, 277, 297, 317 or 337, wherein the serine is L-serine
[0881] 374. The peptide according to any of items 18, 38, 58, 78, 98, 118, 138, 158, 178, 198, 218, 238, 258, 278, 298, 318 or 338, wherein the threonine is D-threonine
[0882] 375. The peptide according to any of items 18, 38, 58, 78, 98, 118, 138, 158, 178, 198, 218, 238, 258, 278, 298, 318 or 338, wherein the threonine is L-threonine
[0883] 376. The peptide according to any of items 19, 39, 59, 79, 99, 119, 139, 159, 179, 199, 219, 239, 259, 279, 299, 319 or 339, wherein the tryptophan is D-tryptophan
[0884] 377. The peptide according to any of items 19, 39, 59, 79, 99, 119, 139, 159, 179, 199, 219, 239, 259, 279, 299, 319 or 339, wherein the tryptophan is L-tryptophan
[0885] 378. The peptide according to any of items 20, 40, 60, 80, 100, 120, 140, 160, 180, 200, 220, 240, 260, 280, 300, 320 or 340, wherein the tyrosine is D-tyrosine
[0886] 379. The peptide according to any of items 20, 40, 60, 80, 100, 120, 140, 160, 180, 200, 220, 240, 260, 280, 300, 320 or 340, wherein the tyrosine is L-tyrosine
[0887] 380. The peptide according to any of items 21, 41, 61, 81, 101, 121, 141, 161, 181, 201, 221, 241, 261, 281, 301, 321 or 341, wherein the valine is D-valine
[0888] 381. The peptide according to any of items 21, 41, 61, 81, 101, 121, 141, 161, 181, 201, 221, 241, 261, 281, 301, 321 or 341, wherein the valine is L-valine
[0889] 382. The peptide according to item 1 to 381, wherein one or more of said amino acid residues are modified, such as post-translationally modified or co-translationally modified
[0890] 383. The peptide according to item 382, wherein said modification is acetylation of one or more amino acid residues
[0891] 384. The peptide according to item 382, wherein said modification is phosphorylation of one or more amino acid residues
[0892] 385. The peptide according to item 382, wherein said modification is glycosylation of one or more amino acid residues
[0893] 386. The peptide according to item 382, wherein said modification is non-enzymatic glycosylation (or glycation) of one or more amino acid residues
[0894] 387. The peptide according to item 382, wherein said modification is methylation of one or more amino acid residues
[0895] 388. The peptide according to item 382, wherein said modification is amidation of one or more amino acid residues
[0896] 389. The peptide according to item 382, wherein said modification is deamidation of one or more amino acid residues
[0897] 390. The peptide according to item 382, wherein said modification is succinimide formation of one or more amino acid residues
[0898] 391. The peptide according to item 382, wherein said modification is biotinylation of one or more amino acid residues
[0899] 392. The peptide according to item 382, wherein said modification is formylation of one or more amino acid residues
[0900] 393. The peptide according to item 382, wherein said modification is carboxylation of one or more amino acid residues
[0901] 394. The peptide according to item 382, wherein said modification is carbamoylation of one or more amino acid residues
[0902] 395. The peptide according to item 382, wherein said modification is hydroxylation of one or more amino acid residues
[0903] 396. The peptide according to item 382, wherein said modification is iodination of one or more amino acid residues
[0904] 397. The peptide according to item 382, wherein said modification is isoprenylation (or prenylation or lipidation or lipoylation) of one or more amino acid residues
[0905] 398. The peptide according to item 382, wherein said modification is GPI (glycosyl phosphatidylinositol) anchor formation of one or more amino acid residues
[0906] 399. The peptide according to item 382, wherein said modification is myristoylation of one or more amino acid residues
[0907] 400. The peptide according to item 382, wherein said modification is farnesylation of one or more amino acid residues
[0908] 401. The peptide according to item 382, wherein said modification is geranylgeranylation of one or more amino acid residues
[0909] 402. The peptide according to item 382, wherein said modification is covalent attachment of nucleotides or derivates thereof to one or more amino acid residues
[0910] 403. The peptide according to item 382, wherein said modification is ADP-ribosylation of one or more amino acid residues
[0911] 404. The peptide according to item 382, wherein said modification is flavin attachment to one or more amino acid residues
[0912] 405. The peptide according to item 382, wherein said modification is oxidation of one or more amino acid residues
[0913] 406. The peptide according to item 382, wherein said modification is oxidative deamination of one or more amino acid residues
[0914] 407. The peptide according to item 382, wherein said modification is deamination of one or more amino acid residues
[0915] 408. The peptide according to item 382, wherein said modification is palmitoylation of one or more amino acid residues
[0916] 409. The peptide according to item 382, wherein said modification is pegylation of one or more amino acid residues
[0917] 410. The peptide according to item 382, wherein said modification is attachment of phosphatidyl-inositol of one or more amino acid residues
[0918] 411. The peptide according to item 382, wherein said modification is phosphopantetheinylation of one or more amino acid residues
[0919] 412. The peptide according to item 382, wherein said modification is polysialylation of one or more amino acid residues
[0920] 413. The peptide according to item 382, wherein said modification is sulfation of one or more amino acid residues
[0921] 414. The peptide according to item 382, wherein said modification is selenoylation of one or more amino acid residues
[0922] 415. The peptide according to item 382, wherein said modification is arginylation of one or more amino acid residues
[0923] 416. The peptide according to item 382, wherein said modification is glutamylation or polyglutamylation of one or more amino acid residues
[0924] 417. The peptide according to item 382, wherein said modification is glycylation or polyglycylation of one or more amino acid residues
[0925] 418. The peptide according to item 382, wherein said modification is acylation (or alkanoylation) of one or more amino acid residues
[0926] 419. The peptide according to item 382, wherein said modification is Methylidene-imidazolone (MIO) formation of one or more amino acid residues
[0927] 420. The peptide according to item 382, wherein said modification is p-Hydroxybenzylidene-imidazolone formation of one or more amino acid residues
[0928] 421. The peptide according to item 382, wherein said modification is Lysine tyrosyl quinone (LTQ) formation of one or more amino acid residues
[0929] 422. The peptide according to item 382, wherein said modification is Topaquinone (TPQ) formation of one or more amino acid residues
[0930] 423. The peptide according to item 382, wherein said modification is Porphyrin ring linkage of one or more amino acid residues
[0931] 424. The peptide according to item 382, wherein said modification is glypiation (addition of glycosyl phosphatidyl inositol) of one or more amino acid residues
[0932] 425. The peptide according to item 382, wherein said modification is addition of heme to one or more amino acid residues
[0933] 426. The peptide according to item 382, wherein said modification is ubiquitination of one or more amino acid residues
[0934] 427. The peptide according to item 382, wherein said modification is SUMOylation (Small Ubiquitin-like Modifier) of one or more amino acid residues
[0935] 428. The peptide according to item 382, wherein said modification is ISGylation of one or more amino acid residues
[0936] 429. The peptide according to item 382, wherein said modification is citrullination (or deimination) of one or more amino acid residues
[0937] 430. The peptide according to item 382, wherein said modification is the formation of pyroglutamic acid (or pidolic acid) of one or more amino acid residues
[0938] 431. The peptide according to item 382, wherein said modification is formation of disulfide bridges (or disulfide bond or SS-bond or persulfide connection) between two amino acid residues
[0939] 432. The peptide according to item 382, wherein said modification is formation of a desmosine cross-link between two or more amino acid residues
[0940] 433. The peptide according to item 382, wherein said modification is transglutamination between two or more amino acid residues
[0941] 434. The peptide according to item 1, wherein any of X₁, X₂, X₃, X₄, X₅, X₆, X₇, X₈, X₉, X₁₀, X₁₁, X₁₂, X₁₃, X₁₄, X₁₅ and/or X₁₆ is an uncommon or modified amino acid
[0942] 435. The peptide according to item 434, wherein said uncommon amino acid is acetylalanine
[0943] 436. The peptide according to item 434, wherein said uncommon amino acid is acetylaspartic acid
[0944] 437. The peptide according to item 434, wherein said uncommon amino acid is acetylcysteine
[0945] 438. The peptide according to item 434, wherein said uncommon amino acid is acetylglutamic acid
[0946] 439. The peptide according to item 434, wherein said uncommon amino acid is acetylglutamine
[0947] 440. The peptide according to item 434, wherein said uncommon amino acid is acetylglycine
[0948] 441. The peptide according to item 434, wherein said uncommon amino acid is acetylisoleucine
[0949] 442. The peptide according to item 434, wherein said uncommon amino acid is acetyllysine
[0950] 443. The peptide according to item 434, wherein said uncommon amino acid is acetylmethionine
[0951] 444. The peptide according to item 434, wherein said uncommon amino acid is acetylproline
[0952] 445. The peptide according to item 434, wherein said uncommon amino acid is acetylserine
[0953] 446. The peptide according to item 434, wherein said uncommon amino acid is acetylthreonine
[0954] 447. The peptide according to item 434, wherein said uncommon amino acid is acetyltyrosine
[0955] 448. The peptide according to item 434, wherein said uncommon amino acid is acetylvaline
[0956] 449. The peptide according to item 434, wherein said uncommon amino acid is acetyllysine
[0957] 450. The peptide according to item 434, wherein said uncommon amino acid is acetylcysteine
[0958] 451. The peptide according to item 434, wherein said uncommon amino acid is alanine amide
[0959] 452. The peptide according to item 434, wherein said uncommon amino acid is arginine amide
[0960] 453. The peptide according to item 434, wherein said uncommon amino acid is asparagine amide
[0961] 454. The peptide according to item 434, wherein said uncommon amino acid is aspartic acid amide
[0962] 455. The peptide according to item 434, wherein said uncommon amino acid is cysteine amide
[0963] 456. The peptide according to item 434, wherein said uncommon amino acid is glutamine amide
[0964] 457. The peptide according to item 434, wherein said uncommon amino acid is glutamic acid amide
[0965] 458. The peptide according to item 434, wherein said uncommon amino acid is glycine amide
[0966] 459. The peptide according to item 434, wherein said uncommon amino acid is histidine amide
[0967] 460. The peptide according to item 434, wherein said uncommon amino acid is isoleucine amide
[0968] 461. The peptide according to item 434, wherein said uncommon amino acid is leucine amide
[0969] 462. The peptide according to item 434, wherein said uncommon amino acid is lysine amide
[0970] 463. The peptide according to item 434, wherein said uncommon amino acid is methionine amide
[0971] 464. The peptide according to item 434, wherein said uncommon amino acid is phenylalanine amide
[0972] 465. The peptide according to item 434, wherein said uncommon amino acid is proline amide
[0973] 466. The peptide according to item 434, wherein said uncommon amino acid is serine amide
[0974] 467. The peptide according to item 434, wherein said uncommon amino acid is threonine amide
[0975] 468. The peptide according to item 434, wherein said uncommon amino acid is tryptophan amide
[0976] 469. The peptide according to item 434, wherein said uncommon amino acid is tyrosine amide
[0977] 470. The peptide according to item 434, wherein said uncommon amino acid is valine amide
[0978] 471. The peptide according to item 434, wherein said uncommon amino acid is an amino acid alcohol
[0979] 472. The peptide according to item 434, wherein said uncommon amino acid is Aminobenzoic Acid
[0980] 473. The peptide according to item 434, wherein said uncommon amino acid is Aminobutyric Acid
[0981] 474. The peptide according to item 434, wherein said uncommon amino acid is Aminocyanobutyric acid
[0982] 475. The peptide according to item 434, wherein said uncommon amino acid is Aminocyanopropionic acid
[0983] 476. The peptide according to item 434, wherein said uncommon amino acid is Aminocyclohexanoic acid
[0984] 477. The peptide according to item 434, wherein said uncommon amino acid is Aminocyclopropanoic acid
[0985] 478. The peptide according to item 434, wherein said uncommon amino acid is Aminocylopentanoic acid
[0986] 479. The peptide according to item 434, wherein said uncommon amino acid is Aminodecanoic acid
[0987] 480. The peptide according to item 434, wherein said uncommon amino acid is Aminododecanoic acid
[0988] 481. The peptide according to item 434, wherein said uncommon amino acid is Aminohexanoic acid
[0989] 482. The peptide according to item 434, wherein said uncommon amino acid is Aminoisobutyric acid
[0990] 483. The peptide according to item 434, wherein said uncommon amino acid is Aminomethylbenzoic acid
[0991] 484. The peptide according to item 434, wherein said uncommon amino acid is Aminomethylcyclohexanoic acid
[0992] 485. The peptide according to item 434, wherein said uncommon amino acid is Aminononanoic acid
[0993] 486. The peptide according to item 434, wherein said uncommon amino acid is Aminooctanoic acid
[0994] 487. The peptide according to item 434, wherein said uncommon amino acid is Aminophenylalanine
[0995] 488. The peptide according to item 434, wherein said uncommon amino acid is Amino Salicylic acid
[0996] 489. The peptide according to item 434, wherein said uncommon amino acid is 2-Amino-2-Thiazoline-4-carboxylic acid
[0997] 490. The peptide according to item 434, wherein said uncommon amino acid is Aminoundecanoic acid
[0998] 491. The peptide according to item 434, wherein said uncommon amino acid is Aminovaleric acid
[0999] 492. The peptide according to item 434, wherein said uncommon amino acid is 4-Benzoylphenylalanine
[1000] 493. The peptide according to item 434, wherein said uncommon amino acid is Biphenylalanine
[1001] 494. The peptide according to item 434, wherein said uncommon amino acid is Bromophenylalanine
[1002] 495. The peptide according to item 434, wherein said uncommon amino acid is gamma-Carboxyglutamic acid
[1003] 496. The peptide according to item 434, wherein said uncommon amino acid is canavanine
[1004] 497. The peptide according to item 434, wherein said uncommon amino acid is Carnitine
[1005] 498. The peptide according to item 434, wherein said uncommon amino acid is Chlorophenylalanine
[1006] 499. The peptide according to item 434, wherein said uncommon amino acid is Chlorotyrosine
[1007] 500. The peptide according to item 434, wherein said uncommon amino acid is Cine
[1008] 501. The peptide according to item 434, wherein said uncommon amino acid is Citrulline
[1009] 502. The peptide according to item 434, wherein said uncommon amino acid is 4-Cyano-2-Aminobutyric acid
[1010] 503. The peptide according to item 434, wherein said uncommon amino acid is Cyclohexylalanine
[1011] 504. The peptide according to item 434, wherein said uncommon amino acid is Cyclohexylglycine
[1012] 505. The peptide according to item 434, wherein said uncommon amino acid is Diaminobenzoic acid
[1013] 506. The peptide according to item 434, wherein said uncommon amino acid is 2,4-Diaminobutyric acid
[1014] 507. The peptide according to item 434, wherein said uncommon amino acid is 2,3-Diaminopropionic acid
[1015] 508. The peptide according to item 434, wherein said uncommon amino acid is Dibutylglycine
[1016] 509. The peptide according to item 434, wherein said uncommon amino acid is Diethylglycine
[1017] 510. The peptide according to item 434, wherein said uncommon amino acid is Dihydrotryptophan
[1018] 511. The peptide according to item 434, wherein said uncommon amino acid is Dipropylglycine
[1019] 512. The peptide according to item 434, wherein said uncommon amino acid is Fluorophenylalanine
[1020] 513. The peptide according to item 434, wherein said uncommon amino acid is formylmethionine
[1021] 514. The peptide according to item 434, wherein said uncommon amino acid is formylglycine
[1022] 515. The peptide according to item 434, wherein said uncommon amino acid is formyllysine
[1023] 516. The peptide according to item 434, wherein said uncommon amino acid is farnesylcysteine
[1024] 517. The peptide according to item 434, wherein said uncommon amino acid is hydroxyfarnesylcysteine
[1025] 518. The peptide according to item 434, wherein said uncommon amino acid is Homoalanine
[1026] 519. The peptide according to item 434, wherein said uncommon amino acid is Homoarginine
[1027] 520. The peptide according to item 434, wherein said uncommon amino acid is Homoasparagine
[1028] 521. The peptide according to item 434, wherein said uncommon amino acid is Homoaspartic acid
[1029] 522. The peptide according to item 434, wherein said uncommon amino acid is Homoglutamic acid
[1030] 523. The peptide according to item 434, wherein said uncommon amino acid is Homoglutamine
[1031] 524. The peptide according to item 434, wherein said uncommon amino acid is Homoisoleucine
[1032] 525. The peptide according to item 434, wherein said uncommon amino acid is Homophenylalanine
[1033] 526. The peptide according to item 434, wherein said uncommon amino acid is Homoserine
[1034] 527. The peptide according to item 434, wherein said uncommon amino acid is Homotyrosine
[1035] 528. The peptide according to item 434, wherein said uncommon amino acid is Hydroxyproline
[1036] 529. The peptide according to item 434, wherein said uncommon amino acid is Hydroxylysine
[1037] 530. The peptide according to item 434, wherein said uncommon amino acid is 2-Indanylglycine
[1038] 531. The peptide according to item 434, wherein said uncommon amino acid is 2-Indolecarboxylic acid
[1039] 532. The peptide according to item 434, wherein said uncommon amino acid is Indoleglycine
[1040] 533. The peptide according to item 434, wherein said uncommon amino acid is Iodophenylalanine
[1041] 534. The peptide according to item 434, wherein said uncommon amino acid is Isonipecotic Acid
[1042] 535. The peptide according to item 434, wherein said uncommon amino acid is Kynurenine
[1043] 536. The peptide according to item 434, wherein said uncommon amino acid is β-(S-Benzyl)Mercapto-β,β-cyclopentamethylene propionic acid
[1044] 537. The peptide according to item 434, wherein said uncommon amino acid is Methyltyrosine
[1045] 538. The peptide according to item 434, wherein said uncommon amino acid is Methylphenylalanine
[1046] 539. The peptide according to item 434, wherein said uncommon amino acid is methylalanine
[1047] 540. The peptide according to item 434, wherein said uncommon amino acid is trimethylalanine
[1048] 541. The peptide according to item 434, wherein said uncommon amino acid is methylglycine
[1049] 542. The peptide according to item 434, wherein said uncommon amino acid is methylmethionine
[1050] 543. The peptide according to item 434, wherein said uncommon amino acid is methylphenylalanine
[1051] 544. The peptide according to item 434, wherein said uncommon amino acid is dimethylproline
[1052] 545. The peptide according to item 434, wherein said uncommon amino acid is dimethylarginine
[1053] 546. The peptide according to item 434, wherein said uncommon amino acid is methylarginine
[1054] 547. The peptide according to item 434, wherein said uncommon amino acid is methylasparagine
[1055] 548. The peptide according to item 434, wherein said uncommon amino acid is methylglutamine
[1056] 549. The peptide according to item 434, wherein said uncommon amino acid is methylhistidine
[1057] 550. The peptide according to item 434, wherein said uncommon amino acid is trimethyllysine
[1058] 551. The peptide according to item 434, wherein said uncommon amino acid is dimethyllysine
[1059] 552. The peptide according to item 434, wherein said uncommon amino acid is methyllysine
[1060] 553. The peptide according to item 434, wherein said uncommon amino acid is methylcysteine
[1061] 554. The peptide according to item 434, wherein said uncommon amino acid is glutamic acid 5-methyl ester
[1062] 555. The peptide according to item 434, wherein said uncommon amino acid is Naphthylalanine
[1063] 556. The peptide according to item 434, wherein said uncommon amino acid is Nipecotic acid
[1064] 557. The peptide according to item 434, wherein said uncommon amino acid is Nitrophenylalanine
[1065] 558. The peptide according to item 434, wherein said uncommon amino acid is Norleucine
[1066] 559. The peptide according to item 434, wherein said uncommon amino acid is Norvaline
[1067] 560. The peptide according to item 434, wherein said uncommon amino acid is Octahydroindolecarboxylic acid
[1068] 561. The peptide according to item 434, wherein said uncommon amino acid is ornithine
[1069] 562. The peptide according to item 434, wherein said uncommon amino acid is Penicillamine
[1070] 563. The peptide according to item 434, wherein said uncommon amino acid is Phenylglycine
[1071] 564. The peptide according to item 434, wherein said uncommon amino acid is phosphocysteine
[1072] 565. The peptide according to item 434, wherein said uncommon amino acid is phosphohistidine
[1073] 566. The peptide according to item 434, wherein said uncommon amino acid is phosphoserine
[1074] 567. The peptide according to item 434, wherein said uncommon amino acid is phosphothreonine
[1075] 568. The peptide according to item 434, wherein said uncommon amino acid is phosphotyrosine
[1076] 569. The peptide according to item 434, wherein said uncommon amino acid is phosphoarginine
[1077] 570. The peptide according to item 434, wherein said uncommon amino acid is (phospho-5′-adenosine)-tyrosine
[1078] 571. The peptide according to item 434, wherein said uncommon amino acid is phosphopantetheine-serine
[1079] 572. The peptide according to item 434, wherein said uncommon amino acid is (phospho-5′-RNA)-serine
[1080] 573. The peptide according to item 434, wherein said uncommon amino acid is (phospho-5′-adenosine)-lysine
[1081] 574. The peptide according to item 434, wherein said uncommon amino acid is (phospho-5′-guanosine)-lysine
[1082] 575. The peptide according to item 434, wherein said uncommon amino acid is (phospho-5′-DNA)-serine
[1083] 576. The peptide according to item 434, wherein said uncommon amino acid is (phospho-5′-RNA)-tyrosine
[1084] 577. The peptide according to item 434, wherein said uncommon amino acid is (phospho-5′-adenosine)-threonine
[1085] 578. The peptide according to item 434, wherein said uncommon amino acid is (phospho-5′-DNA)-tyrosine
[1086] 579. The peptide according to item 434, wherein said uncommon amino acid is (phospho-5′-DNA)-threonine
[1087] 580. The peptide according to item 434, wherein said uncommon amino acid is (phospho-5′-uridine)-tyrosine
[1088] 581. The peptide according to item 434, wherein said uncommon amino acid is 4-Phosphonomethylphenylalanine
[1089] 582. The peptide according to item 434, wherein said uncommon amino acid is palmitoylcysteine
[1090] 583. The peptide according to item 434, wherein said uncommon amino acid is palmitoyllysine
[1091] 584. The peptide according to item 434, wherein said uncommon amino acid is palmitoylthreonine
[1092] 585. The peptide according to item 434, wherein said uncommon amino acid is palmitoylserine
[1093] 586. The peptide according to item 434, wherein said uncommon amino acid is palmitoylcysteine
[1094] 587. The peptide according to item 434, wherein said uncommon amino acid is phycoerythrobilin-bis-cysteine
[1095] 588. The peptide according to item 434, wherein said uncommon amino acid is phycourobilin-bis-cysteine
[1096] 589. The peptide according to item 434, wherein said uncommon amino acid is pyrrolidone-5-carboxylic acid
[1097] 590. The peptide according to item 434, wherein said uncommon amino acid is Pipericolic Acid
[1098] 591. The peptide according to item 434, wherein said uncommon amino acid is Propargylglycine
[1099] 592. The peptide according to item 434, wherein said uncommon amino acid is Pyridinylalanine
[1100] 593. The peptide according to item 434, wherein said uncommon amino acid is pyroglutamic acid
[1101] 594. The peptide according to item 434, wherein said uncommon amino acid is Sarcosine
[1102] 595. The peptide according to item 434, wherein said uncommon amino acid is Tert-Leucine
[1103] 596. The peptide according to item 434, wherein said uncommon amino acid is Tetrahydroisoquinoline-3-carboxylic acid
[1104] 597. The peptide according to item 434, wherein said uncommon amino acid is Thiazolidinecarboxylic acid
[1105] 598. The peptide according to item 434, wherein said uncommon amino acid is Thyronine
[1106] 599. The peptide according to item 434, wherein said uncommon amino acid is selenocysteine
[1107] 600. The peptide according to item 434, wherein said uncommon amino acid is selenomethionine
[1108] 601. The peptide according to item 434, wherein said uncommon amino acid is erythro-beta-hydroxyasparagine
[1109] 602. The peptide according to item 434, wherein said uncommon amino acid is erythro-beta-hydroxyaspartic acid
[1110] 603. The peptide according to item 434, wherein said uncommon amino acid is gamma-carboxyglutamic acid
[1111] 604. The peptide according to item 434, wherein said uncommon amino acid is aspartic 4-phosphoric anhydride
[1112] 605. The peptide according to item 434, wherein said uncommon amino acid is 2′-[3-carboxamido-3-(trimethylammonio)propyl]-histidine
[1113] 606. The peptide according to item 434, wherein said uncommon amino acid is glucuronoylglycine
[1114] 607. The peptide according to item 434, wherein said uncommon amino acid is geranylgeranylcysteine
[1115] 608. The peptide according to item 434, wherein said uncommon amino acid is myristoylglycine
[1116] 609. The peptide according to item 434, wherein said uncommon amino acid is myristoyllysine
[1117] 610. The peptide according to item 434, wherein said uncommon amino acid is cysteine methyl disulfide
[1118] 611. The peptide according to item 434, wherein said uncommon amino acid is diacylglycerolcysteine
[1119] 612. The peptide according to item 434, wherein said uncommon amino acid is isoglutamylcysteine
[1120] 613. The peptide according to item 434, wherein said uncommon amino acid is cysteinylhistidine
[1121] 614. The peptide according to item 434, wherein said uncommon amino acid is lanthionine
[1122] 615. The peptide according to item 434, wherein said uncommon amino acid is mesolanthionine
[1123] 616. The peptide according to item 434, wherein said uncommon amino acid is methyllanthionine
[1124] 617. The peptide according to item 434, wherein said uncommon amino acid is cysteinyltyrosine
[1125] 618. The peptide according to item 434, wherein said uncommon amino acid is carboxylysine
[1126] 619. The peptide according to item 434, wherein said uncommon amino acid is carboxyethyllysine
[1127] 620. The peptide according to item 434, wherein said uncommon amino acid is (4-amino-2-hydroxybutyl)-lysine
[1128] 621. The peptide according to item 434, wherein said uncommon amino acid is biotinyllysine
[1129] 622. The peptide according to item 434, wherein said uncommon amino acid is lipoyllysine
[1130] 623. The peptide according to item 434, wherein said uncommon amino acid is pyridoxal phosphate-lysine
[1131] 624. The peptide according to item 434, wherein said uncommon amino acid is retinal-lysine
[1132] 625. The peptide according to item 434, wherein said uncommon amino acid is allysine
[1133] 626. The peptide according to item 434, wherein said uncommon amino acid is lysinoalanine
[1134] 627. The peptide according to item 434, wherein said uncommon amino acid is isoglutamyllysine
[1135] 628. The peptide according to item 434, wherein said uncommon amino acid is glycyllysine
[1136] 629. The peptide according to item 434, wherein said uncommon amino acid is isoaspartylglycine
[1137] 630. The peptide according to item 434, wherein said uncommon amino acid is pyruvic acid
[1138] 631. The peptide according to item 434, wherein said uncommon amino acid is phenyllactic acid
[1139] 632. The peptide according to item 434, wherein said uncommon amino acid is oxobutanoic acid
[1140] 633. The peptide according to item 434, wherein said uncommon amino acid is succinyltryptophan
[1141] 634. The peptide according to item 434, wherein said uncommon amino acid is phycocyanobilincysteine
[1142] 635. The peptide according to item 434, wherein said uncommon amino acid is phycoerythrobilincysteine
[1143] 636. The peptide according to item 434, wherein said uncommon amino acid is phytochromobilincysteine
[1144] 637. The peptide according to item 434, wherein said uncommon amino acid is heme-bis-cysteine
[1145] 638. The peptide according to item 434, wherein said uncommon amino acid is heme-cysteine
[1146] 639. The peptide according to item 434, wherein said uncommon amino acid is tetrakis-cysteinyl iron
[1147] 640. The peptide according to item 434, wherein said uncommon amino acid is tetrakis-cysteinyl diiron disulfide
[1148] 641. The peptide according to item 434, wherein said uncommon amino acid is tris-cysteinyl triiron trisulfide
[1149] 642. The peptide according to item 434, wherein said uncommon amino acid is tris-cysteinyl triiron tetrasulfide
[1150] 643. The peptide according to item 434, wherein said uncommon amino acid is tetrakis-cysteinyl tetrairon tetrasulfide
[1151] 644. The peptide according to item 434, wherein said uncommon amino acid is cysteinyl homocitryl molybdenum-heptairon-nonasulfide
[1152] 645. The peptide according to item 434, wherein said uncommon amino acid is cysteinyl molybdopterin
[1153] 646. The peptide according to item 434, wherein said uncommon amino acid is (8alpha-FAD)-cysteine
[1154] 647. The peptide according to item 434, wherein said uncommon amino acid is (8alpha-FAD)-histidine
[1155] 648. The peptide according to item 434, wherein said uncommon amino acid is (8alpha-FAD)-tyrosine
[1156] 649. The peptide according to item 434, wherein said uncommon amino acid is dihydroxyphenylalanine
[1157] 650. The peptide according to item 434, wherein said uncommon amino acid is topaquinone
[1158] 651. The peptide according to item 434, wherein said uncommon amino acid is tryptophyl quinine
[1159] 652. The peptide according to item 434, wherein said uncommon amino acid is (tryptophan)-tryptophyl quinone
[1160] 653. The peptide according to item 434, wherein said uncommon amino acid is glycosylasparagine
[1161] 654. The peptide according to item 434, wherein said uncommon amino acid is glycosylcysteine
[1162] 655. The peptide according to item 434, wherein said uncommon amino acid is glycosylhydroxylysine
[1163] 656. The peptide according to item 434, wherein said uncommon amino acid is glycosylserine
[1164] 657. The peptide according to item 434, wherein said uncommon amino acid is glycosylthreonine
[1165] 658. The peptide according to item 434, wherein said uncommon amino acid is glycosyltryptophan
[1166] 659. The peptide according to item 434, wherein said uncommon amino acid is glycosyltyrosine
[1167] 660. The peptide according to item 434, wherein said uncommon amino acid is asparaginyl-glycosylphosphatidylinositolethanolamine
[1168] 661. The peptide according to item 434, wherein said uncommon amino acid is aspartyl-glycosylphosphatidylinositolethanolamine
[1169] 662. The peptide according to item 434, wherein said uncommon amino acid is cysteinyl-glycosylphosphatidylinositolethanolamine
[1170] 663. The peptide according to item 434, wherein said uncommon amino acid is glycyl-glycosylphosphatidylinositolethanolamine
[1171] 664. The peptide according to item 434, wherein said uncommon amino acid is seryl-glycosylphosphatidylinositolethanolamine
[1172] 665. The peptide according to item 434, wherein said uncommon amino acid is seryl-glycosylsphingolipidinositolethanolamine
[1173] 666. The peptide according to item 434, wherein said uncommon amino acid is (phosphoribosyl dephospho-coenzyme A)-serine
[1174] 667. The peptide according to item 434, wherein said uncommon amino acid is (ADP-ribosyl)-arginine
[1175] 668. The peptide according to item 434, wherein said uncommon amino acid is (ADP-ribosyl)-cysteine
[1176] 669. The peptide according to item 434, wherein said uncommon amino acid is glutamyl-glycerylphosphorylethanolamine
[1177] 670. The peptide according to item 434, wherein said uncommon amino acid is sulfocysteine
[1178] 671. The peptide according to item 434, wherein said uncommon amino acid is sulfotyrosine
[1179] 672. The peptide according to item 434, wherein said uncommon amino acid is bromohistidine
[1180] 673. The peptide according to item 434, wherein said uncommon amino acid is bromophenylalanine
[1181] 674. The peptide according to item 434, wherein said uncommon amino acid is triiodothyronine
[1182] 675. The peptide according to item 434, wherein said uncommon amino acid is thyroxine
[1183] 676. The peptide according to item 434, wherein said uncommon amino acid is bromotryptophan
[1184] 677. The peptide according to item 434, wherein said uncommon amino acid is dehydroalanine
[1185] 678. The peptide according to item 434, wherein said uncommon amino acid is dehydrobutyrine
[1186] 679. The peptide according to item 434, wherein said uncommon amino acid is dehydrotyrosine
[1187] 680. The peptide according to item 434, wherein said uncommon amino acid is seryl-imidazolinone glycine
[1188] 681. The peptide according to item 434, wherein said uncommon amino acid is oxoalanine
[1189] 682. The peptide according to item 434, wherein said uncommon amino acid is alanyl-imidazolinone glycine
[1190] 683. The peptide according to item 434, wherein said uncommon amino acid is allo-isoleucine
[1191] 684. The peptide according to item 434, wherein said uncommon amino acid is isoglutamyl-polyglycine
[1192] 685. The peptide according to item 434, wherein said uncommon amino acid is isoglutamyl-polyglutamic acid
[1193] 686. The peptide according to item 434, wherein said uncommon amino acid is aminovinyl-cysteine
[1194] 687. The peptide according to item 434, wherein said uncommon amino acid is (aminovinyl)-methyl-cysteine
[1195] 688. The peptide according to item 434, wherein said uncommon amino acid is cysteine sulfenic acid
[1196] 689. The peptide according to item 434, wherein said uncommon amino acid is glycyl-cysteine
[1197] 690. The peptide according to item 434, wherein said uncommon amino acid is hydroxycinnamyl-cysteine
[1198] 691. The peptide according to item 434, wherein said uncommon amino acid is chondroitin sulfate glucuronyl-galactosyl-galactosyl-xylosyl-serine
[1199] 692. The peptide according to item 434, wherein said uncommon amino acid is dermatan sulfate glucuronyl-galactosyl-galactosyl-xylosyl-serine
[1200] 693. The peptide according to item 434, wherein said uncommon amino acid is heparan sulfate glucuronyl-galactosyl-galactosyl-xylosyl-serine
[1201] 694. The peptide according to item 434, wherein said uncommon amino acid is glycosyl-hydroxyproline
[1202] 695. The peptide according to item 434, wherein said uncommon amino acid is hydroxy-arginine
[1203] 696. The peptide according to item 434, wherein said uncommon amino acid is isoaspartyl-cysteine
[1204] 697. The peptide according to item 434, wherein said uncommon amino acid is alpha-mannosyl-tryptophan
[1205] 698. The peptide according to item 434, wherein said uncommon amino acid is mureinyl-lysine
[1206] 699. The peptide according to item 434, wherein said uncommon amino acid is chondroitin sulfate-aspartic acid ester
[1207] 700. The peptide according to item 434, wherein said uncommon amino acid is (6-FMN)-cysteine
[1208] 701. The peptide according to item 434, wherein said uncommon amino acid is diphytanylglycerol diether-cysteine
[1209] 702. The peptide according to item 434, wherein said uncommon amino acid is bis-cysteinyl bis-histidino diiron disulfide
[1210] 703. The peptide according to item 434, wherein said uncommon amino acid is hexakis-cysteinyl hexairon hexasulfide
[1211] 704. The peptide according to item 434, wherein said uncommon amino acid is cysteine glutathione disulfide
[1212] 705. The peptide according to item 434, wherein said uncommon amino acid is nitrosyl-cysteine
[1213] 706. The peptide according to item 434, wherein said uncommon amino acid is (ADP-ribosyl)-asparagine
[1214] 707. The peptide according to item 434, wherein said uncommon amino acid is beta-methylthioaspartic acid
[1215] 708. The peptide according to item 434, wherein said uncommon amino acid is (lysine)-topaquinone
[1216] 709. The peptide according to item 434, wherein said uncommon amino acid is hydroxymethyl-asparagine
[1217] 710. The peptide according to item 434, wherein said uncommon amino acid is (ADP-ribosyl)-serine
[1218] 711. The peptide according to item 434, wherein said uncommon amino acid is cysteine oxazolecarboxylic acid
[1219] 712. The peptide according to item 434, wherein said uncommon amino acid is cysteine oxazolinecarboxylic acid
[1220] 713. The peptide according to item 434, wherein said uncommon amino acid is glycine oxazolecarboxylic acid
[1221] 714. The peptide according to item 434, wherein said uncommon amino acid is glycine thiazolecarboxylic acid
[1222] 715. The peptide according to item 434, wherein said uncommon amino acid is serine thiazolecarboxylic acid
[1223] 716. The peptide according to item 434, wherein said uncommon amino acid is phenyalanine thiazolecarboxylic acid
[1224] 717. The peptide according to item 434, wherein said uncommon amino acid is cysteine thiazolecarboxylic acid
[1225] 718. The peptide according to item 434, wherein said uncommon amino acid is lysine thiazolecarboxylic acid
[1226] 719. The peptide according to item 434, wherein said uncommon amino acid is keratan sulfate glucuronyl-galactosyl-galactosyl-xylosyl-threonine
[1227] 720. The peptide according to item 434, wherein said uncommon amino acid is selenocysteinyl molybdopterin guanine dinucleotide
[1228] 721. The peptide according to item 434, wherein said uncommon amino acid is histidyl-tyrosine
[1229] 722. The peptide according to item 434, wherein said uncommon amino acid is methionine sulfone
[1230] 723. The peptide according to item 434, wherein said uncommon amino acid is dipyrrolylmethanemethyl-cysteine
[1231] 724. The peptide according to item 434, wherein said uncommon amino acid is glutamyl-tyrosine
[1232] 725. The peptide according to item 434, wherein said uncommon amino acid is glutamyl-poly-glutamic acid
[1233] 726. The peptide according to item 434, wherein said uncommon amino acid is cysteine sulfinic acid
[1234] 727. The peptide according to item 434, wherein said uncommon amino acid is trihydroxyphenylalanine
[1235] 728. The peptide according to item 434, wherein said uncommon amino acid is (sn-1-glycerophosphoryl)-serine
[1236] 729. The peptide according to item 434, wherein said uncommon amino acid is thioglycine
[1237] 730. The peptide according to item 434, wherein said uncommon amino acid is heme P460-bis-cysteine-tyrosine
[1238] 731. The peptide according to item 434, wherein said uncommon amino acid is tris-cysteinyl-cysteine persulfido-bis-glutamato-histidino tetrairon disulfide trioxide
[1239] 732. The peptide according to item 434, wherein said uncommon amino acid is cysteine persulfide
[1240] 733. The peptide according to item 434, wherein said uncommon amino acid is Lactic acid (2-hydroxypropanoic acid)
[1241] 734. The peptide according to any of items 434 to 733, wherein said uncommon amino acid is the L-enantiomer
[1242] 735. The peptide according to any of items 434 to 733, wherein said uncommon amino acid is the D-enantiomer

[1243] The present invention is in one embodiment characterized by the items listed herein below in the ‘second set of items’.

### Second Set of Items:

[1244] 1. A composition for vaccination and/or immune monitoring of a vaccine response comprising one or more pharmamers.

[1245] 2. The composition according to item 1, wherein the one or more pharmamers comprises one or more MHC multimers.

[1246] 3. The composition according to item 2, wherein the one or more MHC multimers comprises a MHC multimer comprising (a-b-P)ₙ, wherein n>1,

wherein a and b together form a functional MHC protein capable of binding the peptide P, when P is present
wherein (a-b-P) is the MHC-peptide complex formed when the peptide P binds to the functional MHC protein,
wherein each MHC peptide complex is associated with one or more multimerization domains.

[1247] 4. The composition according to item 3, wherein the association is a covalent linkage so that one or more of the n MHC-peptide complexes is covalently linked to the one or more multimerization domains.

[1248] 5. The composition according to item 3, wherein the association is a non-covalent association so that one or more of the n MHC-peptide complexes is non-covalently associated with the one or more multimerization domains.

[1249] 6. The composition according to item 3, wherein the one or more multimerization domains comprises one or more scaffolds.

[1250] 7. The composition according to item 3, wherein the one or more multimerization domains comprises one or more carriers.

[1251] 8. The composition according to item 3, wherein the one or more multimerization domains comprises at least one scaffold and at least one carrier.

[1252] 9. The composition according to item 3, wherein the one or more multimerization domains comprise one or more optionally substituted organic molecules.

[1253] 10. The composition according to item 9, wherein the optionally substituted organic molecule comprises one or more functionalized cyclic structures.

[1254] 11. The composition according to item 10, wherein the one or more functionalized cyclic structures comprises one or more benzene rings.

[1255] 12. The composition according to item 9, wherein the optionally substituted organic molecule comprises a scaffold molecule comprising at least three reactive groups, or at least three sites suitable for non-covalent attachment.

[1256] 13. The composition according to item 3, wherein the one or more multimerization domains comprises one or more biological cells, such as antigen presenting cells or dendritic cells or cells transfected with one or more genes encoding MHC molecules.

[1257] 14. The composition according to item 3, wherein the one or more multimerization domains comprises one or more membranes.

[1258] 15. The composition according to item 14, wherein the one or more membranes comprises liposomes or micelles.

[1259] 16. The composition according to item 3, wherein the one or more multimerization domains comprises one or more polymers.

[1260] 17. The composition according to item 16, wherein the one or more polymers are selected from the group consisting of polysaccharides.

[1261] 18. The composition according to item 17, wherein the polysaccharide comprises one or more dextran moieties.

[1262] 19. The composition according to item 3, wherein the one or more multimerization domains comprises one or more entities selected from the group consisting of an IgG domain, a coiled-coil polypeptide structure, a DNA duplex, a nucleic acid duplex, PNA-PNA, PNA-DNA, DNA-RNA, streptavidin and avidin.

[1263] 20. The composition according to item 3, wherein the one or more multimerization domains comprises an avidin, such as streptavidin.

[1264] 21. The composition according to item 3, wherein the one or more multimerization domains comprises an antibody.

[1265] 22. The composition according to item 21, wherein the antibody is selected from the group consisting of polyclonal antibody, monoclonal antibody, IgA, IgG, IgM, IgD, IgE, IgG1, IgG2, IgG3, IgG4, IgA1, IgA2, IgM1, IgM2, humanized antibody, humanized monoclonal antibody, chimeric antibody, mouse antibody, rat antibody, rabbit antibody, human antibody, camel antibody, sheep antibody, engineered human antibody, epitope-focused antibody, agonist antibody, antagonist antibody, neutralizing antibody, naturally-occurring antibody, isolated antibody, monovalent antibody, bispecific antibody, trispecific antibody, multispecific antibody, heteroconjugate antibody, immunoconjugates, immunoliposomes, labeled antibody, antibody fragment, domain antibody, nanobody, minibody, maxibody, diabody, fusion antibody.

[1266] 23. The composition according to item 3, wherein the MHC multimer comprises one or more small organic scaffold molecules.

[1267] 24. The composition according to item 3, wherein the MHC multimer comprises one or more further polypeptides in addition to a and b.

[1268] 25. The composition according to item 3, wherein the MHC multimer comprises one or more protein complexes.

[1269] 26. The composition according to item 3, wherein the MHC multimer comprises one or more beads.

[1270] 27. The composition according to item 3, wherein the multimerization domain comprises one or more compounds selected from the group consisting of agarose, sepharose, resin beads, glass beads, pore-glass beads, glass particles coated with a hydrophobic polymer, chitosan-coated beads, SH beads, latex beads, spherical latex beads, allele-type beads, SPA bead, PEG-based resins, PEG-coated bead, PEG-encapsulated bead, polystyrene beads, magnetic polystyrene beads, glutathione agarose beads, magnetic bead, paramagnetic beads, protein A and/or protein G sepharose beads, activated carboxylic acid bead, macroscopic beads, microscopic beads, insoluble resin beads, silica-based resins, cellulosic resins, cross-linked agarose beads, polystyrene beads, cross-linked polyacrylamide resins, beads with iron cores, metal beads, dynabeads, Polymethylmethacrylate beads activated with NHS, streptavidin-agarose beads, polypropylene, polyethylene, dextran, nylon, amylases, natural and modified celluloses, nitrocellulose, polyacrylamides, gabbros, magnetite, polymers, oligomers, non-repeating moieties, polyethylene glycol (PEG), monomethoxy-PEG, mono-(C₁-C₁₀)alkoxy-PEG, aryloxy-PEG, poly-(N-vinyl pyrrolidone)PEG, tresyl monomethoxy PEG, PEG propionaldehyde, bis-succinimidyl carbonate PEG, polystyrene bead crosslinked with divinylbenzene, propylene glycol homopolymers, a polypropylene oxide/ethylene oxide co-polymer, polyoxyethylated polyols (e.g., glycerol), polyvinyl alcohol, dextran, aminodextran, carbohydrate-based polymers, cross-linked dextran beads, polysaccharide beads, polycarbamate beads, divinyl sulfone activated polysaccharide, polystyrene beads that have been functionalized with tosyl-activated esters, magnetic polystyrene beads functionalized with tosyl-activated esters, streptavidin beads, streptavidin-monomer coated beads, streptavidin-tetramer coated beads, Streptavidin Coated Compel Magnetic beads, avidin coated beads, dextramer coated beads, divinyl sulfone-activated dextran, Carboxylate-modified bead, amine-modified beads, antibody coated beads, cellulose beads, grafted co-poly beads, poly-acrylamide beads, dimethylacrylamide beads optionally crosslinked with N—N′-bis-acryloylethylenediamine, hollow fiber membranes, fluorescent beads, collagen-agarose beads, gelatin beads, collagen-gelatin beads, collagen-fibronectin-gelatin beads, collagen beads, chitosan beads, collagen-chitosan beads, protein-based beads, hydrogel beads, hemicellulose, alkyl cellulose, hydroxyalkyl cellulose, carboxymethylcellulose, sulfoethylcellulose, starch, xylan, amylopectine, chondroitin, hyarulonate, heparin, guar, xanthan, mannan, galactomannan, chitin and chitosan.

[1271] 28. The composition according to item 3, wherein the one or more multimerization domains comprises a dimerization domain.

[1272] 29. The composition according to item 3, wherein the one or more multimerization domains comprises a trimerization domain.

[1273] 30. The composition according to item 3, wherein the one or more multimerization domains comprises a tetramerization domain.

[1274] 31. The composition according to item 3, wherein the one or more multimerization domains comprises a pentamerization domain.

[1275] 32. The composition according to item 31, wherein the pentamerization domain comprises a coiled-coil polypeptide structure.

[1276] 33. The composition according to item 3, wherein the one or more multimerization domains comprises a hexamerization domain.

[1277] 34. The composition according to item 33, wherein the hexamerization domain comprises three IgG domains.

[1278] 35. The composition according to item 3, wherein the one or more multimerization domains comprises a polymer structure to which is attached one or more scaffolds.

[1279] 36. The composition according to item 35, wherein the polymer structure comprises a polysaccharide.

[1280] 37. The composition according to item 36, wherein the polysaccharide comprises one or more dextran moieties.

[1281] 38. The composition according to item 3, wherein the one or more multimerization domains comprises a polyamide and/or a polyethylene glycol and/or a polysaccharide and/or a sepharose.

[1282] 39. The composition according to item 3, wherein the one or more multimerization domains comprises a carboxy methyl dextran and/or a dextran polyaldehyde and/or a carboxymethyl dextran lactone and/or a cyclodextrin.

[1283] 40. The composition according to item 3, wherein the one or more multimerization domains have a molecular weight of less than 1,000 Da.

[1284] 41. The composition according to item 3, wherein the one or more multimerization domains have a molecular weight of from 1,000 Da to preferably less than 10,000 Da.

[1285] 42. The composition according to item 3, wherein the one or more multimerization domains have a molecular weight of from 10,000 Da to preferably less than 100,000 Da.

[1286] 43. The composition according to item 3, wherein the one or more multimerization domains have a molecular weight of from 100,000 Da to preferably less than 1,000,000 Da.

[1287] 44. The composition according to item 3, wherein the one or more multimerization domains have a molecular weight of more than 1,000,000 Da.

[1288] 45. The composition according to item 3, wherein the one or more multimerization domains have a molecular weight of from 50,000 Da to preferably less than 1,000,000 Da, such as from 50,000 Da to 980,000; for example from 50,000 Da to 960,000; such as from 50,000 Da to 940,000; for example from 50,000 Da to 920,000; such as from 50,000 Da to 900,000; for example from 50,000 Da to 880,000; such as from 50,000 Da to 860,000; for example from 50,000 Da to 840,000; such as from 50,000 Da to 820,000; for example from 50,000 Da to 800,000; such as from 50,000 Da to 780,000; for example from 50,000 Da to 760,000; such as from 50,000 Da to 740,000; for example from 50,000 Da to 720,000; such as from 50,000 Da to 700,000; for example from 50,000 Da to 680,000; such as from 50,000 Da to 660,000; for example from 50,000 Da to 640,000; such as from 50,000 Da to 620,000; for example from 50,000 Da to 600,000; such as from 50,000 Da to 580,000; for example from 50,000 Da to 560,000; such as from 50,000 Da to 540,000; for example from 50,000 Da to 520,000; such as from 50,000 Da to 500,000; for example from 50,000 Da to 480,000; such as from 50,000 Da to 460,000; for example from 50,000 Da to 440,000; such as from 50,000 Da to 420,000; for example from 50,000 Da to 400,000; such as from 50,000 Da to 380,000; for example from 50,000 Da to 360,000; such as from 50,000 Da to 340,000; for example from 50,000 Da to 320,000; such as from 50,000 Da to 300,000; for example from 50,000 Da to 280,000; such as from 50,000 Da to 260,000; for example from 50,000 Da to 240,000; such as from 50,000 Da to 220,000; for example from 50,000 Da to 200,000; such as from 50,000 Da to 180,000; for example from 50,000 Da to 160,000; such as from 50,000 Da to 140,000; for example from 50,000 Da to 120,000; such as from 50,000 Da to 100,000; for example from 50,000 Da to 80,000; such as from 50,000 Da to 60,000; for example from 100,000 Da to 1,000,000; such as from 100,000 Da to 980,000; for example from 100,000 Da to 960,000; such as from 100,000 Da to 940,000; for example from 100,000 Da to 920,000; such as from 100,000 Da to 900,000; for example from 100,000 Da to 880,000; such as from 100,000 Da to 860,000; for example from 100,000 Da to 840,000; such as from 100,000 Da to 820,000; for example from 100,000 Da to 800,000; such as from 100,000 Da to 780,000; for example from 100,000 Da to 760,000; such as from 100,000 Da to 740,000; for example from 100,000 Da to 720,000; such as from 100,000 Da to 700,000; for example from 100,000 Da to 680,000; such as from 100,000 Da to 660,000; for example from 100,000 Da to 640,000; such as from 100,000 Da to 620,000; for example from 100,000 Da to 600,000; such as from 100,000 Da to 580,000; for example from 100,000 Da to 560,000; such as from 100,000 Da to 540,000; for example from 100,000 Da to 520,000; such as from 100,000 Da to 500,000; for example from 100,000 Da to 480,000; such as from 100,000 Da to 460,000; for example from 100,000 Da to 440,000; such as from 100,000 Da to 420,000; for example from 100,000 Da to 400,000; such as from 100,000 Da to 380,000; for example from 100,000 Da to 360,000; such as from 100,000 Da to 340,000; for example from 100,000 Da to 320,000; such as from 100,000 Da to 300,000; for example from 100,000 Da to 280,000; such as from 100,000 Da to 260,000; for example from 100,000 Da to 240,000; such as from 100,000 Da to 220,000; for example from 100,000 Da to 200,000; such as from 100,000 Da to 180,000; for example from 100,000 Da to 160,000; such as from 100,000 Da to 140,000; for example from 100,000 Da to 120,000; such as from 150,000 Da to 1,000,000; for example from 150,000 Da to 960,000; such as from 150,000 Da to 940,000; for example from 150,000 Da to 920,000; such as from 150,000 Da to 900,000; for example from 150,000 Da to 880,000; such as from 150,000 Da to 860,000; for example from 150,000 Da to 840,000; such as from 150,000 Da to 820,000; for example from 150,000 Da to 800,000; such as from 150,000 Da to 780,000; for example from 150,000 Da to 760,000; such as from 150,000 Da to 740,000; for example from 150,000 Da to 720,000; such as from 150,000 Da to 700,000; for example from 150,000 Da to 680,000; such as from 150,000 Da to 660,000; for example from 150,000 Da to 640,000; such as from 150,000 Da to 620,000; for example from 150,000 Da to 600,000; such as from 150,000 Da to 580,000; for example from 150,000 Da to 560,000; such as from 150,000 Da to 540,000; for example from 150,000 Da to 520,000; such as from 150,000 Da to 500,000; for example from 150,000 Da to 480,000; such as from 150,000 Da to 460,000; for example from 150,000 Da to 440,000; such as from 150,000 Da to 420,000; for example from 150,000 Da to 400,000; such as from 150,000 Da to 380,000; for example from 150,000 Da to 360,000; such as from 150,000 Da to 340,000; for example from 150,000 Da to 320,000; such as from 150,000 Da to 300,000; for example from 150,000 Da to 280,000; such as from 150,000 Da to 260,000; for example from 150,000 Da to 240,000; such as from 150,000 Da to 220,000; for example from 150,000 Da to 200,000; such as from 150,000 Da to 180,000; for example from 150,000 Da to 160,000.

[1289] 46. The composition according to item 3, wherein n is 2.

[1290] 47. The composition according to item 3, wherein n is 3.

[1291] 48. The composition according to item 3, wherein n is 4.

[1292] 49. The composition according to item 3, wherein n is 5.

[1293] 50. The composition according to item 3, wherein n is 6.

[1294] 51. The composition according to item 3, wherein n is 7.

[1295] 52. The composition according to item 3, wherein n is 8, 9, 10, 11 or 12.

[1296] 53. The composition according to item 3, wherein n<12.

[1297] 54. The composition according to item 3, wherein 1<n<100.

[1298] 55. The composition according to item 3, wherein 1<n<1000.

[1299] 56. The composition according to item 3, wherein 1<n.

[1300] 57. The composition according to item 3, wherein n is billions or trillions or higher.

[1301] 58. The composition according to item 3, wherein n<1,000,000,000.

[1302] 59. The composition according to item 3, wherein n<1,000,000,000,000,000,000.

[1303] 60. The composition according to item 3, wherein n (the total number of MHC molecules of the construct) is in the range from 100 MHC molecules to 1,000,000 MHC molecules such as from 100 to 1,000 MHC molecules, for example from 1,000 to 5,000 MHC molecules, such as from 5,000 to 10,000 MHC molecules, for example from 10,000 to 20,000 MHC molecules, such as from 20,000 to 30,000 MHC molecules, for example from 30,000 to 40,000 MHC molecules, such as from 40,000 to 50,000 MHC molecules, for example from 50,000 to 60,000 MHC molecules, such as from 60,000 to 70,000 MHC molecules, for example from 70,000 to 80,000 MHC molecules, such as from 80,000 to 90,000 MHC molecules, for example from 90,000 to 100,000 MHC molecules, such as from 100,000 to 200,000 MHC molecules, for example from 200,000 to 300,000 MHC molecules, such as from 300,000 to 400,000 MHC molecules, for example from 400,000 to 500,000 MHC molecules, such as from 500,000 to 600,000 MHC molecules, for example from 600,000 to 700,000 MHC molecules, such as from 700,000 to 800,000 MHC molecules, for example from 800,000 to 900,000 MHC molecules, such as from 900,000 to 1,000,000 MHC molecules.

[1304] 61. The vaccine composition according to any of items 3 to 60, wherein n is selected from the group of integers consisting of 1, 2, 3, 4, 5, 6, 7, 8, 9, 10, 11, 12, 13, 14, 15, 16, 17, 18, 19, 20, 21, 22, 23, 24, 25, 26, 27, 28, 29, 30, 31, 32, 33, 34, 35, 36, 37, 38, 39, 40, 41, 42, 43, 44, 45, 46, 47, 48, 50, 55, 60, 65, 70, 75, 80, 85, 90, 95, 100, 110, 120, 130, 140, 150, 160, 170, 180, 190, 200, 250, 300, 350, 400, 450, 500, 550, 600, 650, 700, 750, 800, 850, 900 and 1000.

[1305] 62. The vaccine composition according to any of items 3 to 60, wherein n has a value of from 1 to 1000, for example from 1 to 10, such as from 10 to 20, for example from 20 to 30, such as from 30 to 40, for example from 40 to 50, such as from 50 to 60, for example from 60 to 70, such as from 70 to 80, for example from 80 to 90, such as from 90 to 100, for example from 100 to 120, such as from 120 to 140, for example from 140 to 160, such as from 160 to 180, for example from 180 to 200, such as from 200 to 250, for example from 250 to 300, such as from 300 to 350, for example from 350 to 400, such as from 400 to 450, for example from 450 to 500, such as from 500 to 550, for example from 550 to 600, such as from 600 to 650, for example from 650 to 700, such as from 700 to 750, for example from 750 to 800, such as from 800 to 900, for example from 900 to 950, such as from 950 to 1000.

[1306] 63. The composition according to item 3, wherein a and/or b and/or P is of human origin.

[1307] 64. The composition according to item 3, wherein a and/or b and/or P is of mouse origin.

[1308] 65. The composition according to item 3, wherein a and/or b and/or P is of primate origin.

[1309] 66. The composition according to item 3, wherein a and/or b and/or P is of chimpanzee origin.

[1310] 67. The composition according to item 3, wherein a and/or b and/or P is of gorilla origin.

[1311] 68. The composition according to item 3, wherein a and/or b and/or P is of orangutan origin.

[1312] 69. The composition according to item 3, wherein a and/or b and/or P is of monkey origin.

[1313] 70. The composition according to item 3, wherein a and/or b and/or P is of Macaque origin.

[1314] 71. The composition according to item 3, wherein a and/or b and/or P is of porcine (swine/pig) origin.

[1315] 72. The composition according to item 3, wherein a and/or b and/or P is of bovine (cattle/antelopes) origin.

[1316] 73. The composition according to item 3, wherein a and/or b and/or P is of equine (horse) origin.

[1317] 74. The composition according to item 3, wherein a and/or b and/or P is of Camelides (camels) origin.

[1318] 75. The composition according to item 3, wherein a and/or b and/or P is of ruminant origin.

[1319] 76. The composition according to item 3, wherein a and/or b and/or P is of Canine (Dog) origin.

[1320] 77. The composition according to item 3, wherein a and/or b and/or P is of Feline (Cat) origin.

[1321] 78. The composition according to item 3, wherein a and/or b and/or P is of Bird origin.

[1322] 79. The composition according to item 3, wherein a and/or b and/or P is of Chicken origin.

[1323] 80. The composition according to item 3, wherein a and/or b and/or P is of Turkey origin.

[1324] 81. The composition according to item 3, wherein a and/or b and/or P is of Fish origin.

[1325] 82. The composition according to item 3, wherein a and/or b and/or P is of Reptile origin.

[1326] 83. The composition according to item 3, wherein a and/or b and/or P is of Amphibian origin.

[1327] 84. The composition according to item 3 to 83, wherein (a-b-P) is a class 1 MHC-peptide complex.

[1328] 85. The composition according to item 3 to 83, wherein (a-b-P) is a class 2 MHC-peptide complex.

[1329] 86. The composition according to item 3 to 85, wherein one or more labels are attached directly to the MHC multimer.

[1330] 87. The composition according to item 3 to 85, wherein one or more labels are used for combinatorial use of labelling of the MHC multimer.

[1331] 88. The composition according to item 3 to 85, wherein one or more labels are attached indirectly to the MHC multimer such as via one or more marker molecules carrying one or more labels.

[1332] 89. The composition according to item 3 to 85, wherein one or more labels result in positive selection of that MHC multimer.

[1333] 90. The composition according to item 3 to 85, wherein one or more labels result in negative selection of that MHC multimer.

[1334] 91. The composition according to item 3 to 85 comprising one or more covalently attached labels.

[1335] 92. The composition according to item 3 to 85 comprising one or more non-covalently attached labels.

[1336] 93. The composition according to item 91, wherein the one or more labels is covalently attached to the polypeptide a.

[1337] 94. The composition according to item 91, wherein the one or more labels is covalently attached to the polypeptide b.

[1338] 95. The composition according to item 91, wherein the one or more labels is covalently attached to the peptide P.

[1339] 96. The composition according to item 91, wherein the one or more labels is covalently attached to the one or more multimerization domains.

[1340] 97. The composition according to item 91, wherein the one or more labels is covalently attached to (a-b-P)ₙ.

[1341] 98. The composition according to item 92, wherein the one or more labels is non-covalently attached to the polypeptide a.

[1342] 99. The composition according to item 92, wherein the one or more labels is non-covalently attached to the polypeptide b.

[1343] 100. The composition according to item 92, wherein the one or more labels is non-covalently attached to P.

[1344] 101. The composition according to item 92, wherein the one or more labels is non-covalently attached to the one or more multimerization domains.

[1345] 102. The composition according to item 92, wherein the one or more labels is non-covalently attached to (a-b-P)ₙ.

[1346] 103. The composition according to item 92, wherein the one or more labels is non-covalently attached to the antibody in the multimerization domain.

[1347] 104. The composition according to item 91, wherein the one or more labels is covalently attached to an antibody in the multimerization domain.

[1348] 105. The composition according to item 92, wherein the one or more labels is non-covalently attached to an aptamer in the multimerization domain.

[1349] 106. The composition according to item 91, wherein the one or more labels is covalently attached to an aptamer in the multimerization domain.

[1350] 107. The composition according to item 92, wherein the one or more labels is non-covalently attached to a molecule in the multimerization domain.

[1351] 108. The composition according to item 91, wherein the one or more labels is covalently attached to a molecule in the multimerization domain.

[1352] 109. The composition according to item 92, wherein the one or more labels is non-covalently attached to a protein in the multimerization domain.

[1353] 110. The composition according to item 91, wherein the one or more labels is covalently attached to a protein in the multimerization domain.

[1354] 111. The composition according to item 92, wherein the one or more labels is non-covalently attached to a sugar residue in the multimerization domain.

[1355] 112. The composition according to item 91, wherein the one or more labels is covalently attached to a sugar residue in the multimerization domain.

[1356] 113. The composition according to item 92, wherein the one or more labels is non-covalently attached to a DNA in the multimerization domain.

[1357] 114. The composition according to item 91, wherein the one or more labels is covalently attached to a DNA in the multimerization domain.

[1358] 115. The composition according to item 86 to 114, wherein the attachment is directly between reactive groups in the labelling molecule and reactive groups in the marker molecule.

[1359] 116. The composition according to item 86 to 114, wherein the attachment is through a linker connecting labelling molecule and marker.

[1360] 117. The composition according to item 86 to 116, wherein one label is used.

[1361] 118. The MHC multimer according to any of the items 86 to 116, wherein more than one label is used.

[1362] 119. The composition according to item 118, wherein the more than one label are all identical.

[1363] 120. The composition according to item 118, wherein at least two labels are different.

[1364] 121. The composition according to item 86 to 120, wherein the one or more labels is attached to (a-b-P)ₙ via a streptavidin-biotin linkage.

[1365] 122. The composition according to item 86 to 120, wherein the one or more labels is a fluorophore label.

[1366] 123. The composition according to item 122, wherein the one or more fluorophore label are selected from the group of fluorescein isothiocyanate, rhodamine, phycoerythrin, phycocyanin, allophycocyanin, o-phthaldehyde and fluorescamine.

[1367] 124. The composition according to item 122, wherein the one or more fluorophore label are selected from the group consisting of 2-(4′-maleimidylanilino)naphthalene-6-sulfonic acid, sodium salt.

[1368] 125. The composition according to item 122, wherein the one or more fluorophore label are selected from the group consisting of 5-((((2-iodoacetyl)amino)ethyl)amino)naphthalene-1-sulfonic acid.

[1369] 126. The composition according to item 122, wherein the one or more fluorophore label are selected from the group consisting of Pyrene-1-butanoic acid.

[1370] 127. The composition according to item 122, wherein the one or more fluorophore label are selected from the group consisting of AlexaFluor 350 (7-amino-6-sulfonic acid-4-methyl coumarin-3-acetic acid.

[1371] 128. The composition according to item 122, wherein the one or more fluorophore label are selected from the group consisting of AMCA (7-amino-4-methyl coumarin-3-acetic acid.

[1372] 129. The composition according to item 122, wherein the one or more fluorophore label are selected from the group consisting of 7-hydroxy-4-methyl coumarin-3-acetic acid.

[1373] 130. The composition according to item 122, wherein the one or more fluorophore label are selected from the group consisting of Marina Blue (6,8-difluoro-7-hydroxy-4-methyl coumarin-3-acetic acid.

[1374] 131. The composition according to item 122, wherein the one or more fluorophore label are selected from the group consisting of 7-dimethylamino-coumarin-4-acetic acid.

[1375] 132. The composition according to item 122, wherein the one or more fluorophore label are selected from the group consisting of Fluorescamin-N-butyl amine adduct.

[1376] 133. The composition according to item 122, wherein the one or more fluorophore label are selected from the group consisting of 7-hydroxy-coumarine-3-carboxylic acid.

[1377] 134. The composition according to item 122, wherein the one or more fluorophore label are selected from the group consisting of CascadeBlue (pyrene-trisulphonic acid acetyl azide.

[1378] 135. The composition according to item 122, wherein the one or more fluorophore label are selected from the group consisting of Cascade Yellow.

[1379] 136. The composition according to item 122, wherein the one or more fluorophore label are selected from the group consisting of Pacific Blue (6,8 difluoro-7-hydroxy coumarin-3-carboxylic acid.

[1380] 137. The composition according to item 122, wherein the one or more fluorophore label are selected from the group consisting of 7-diethylamino-coumarin-3-carboxylic acid.

[1381] 138. The composition according to item 122, wherein the one or more fluorophore label are selected from the group consisting of N-(((4-azidobenzoyl)amino)ethyl)-4-amino-3,6-disulfo-1,8-naphthalimide, dipotassium salt.

[1382] 139. The composition according to item 122, wherein the one or more fluorophore label are selected from the group consisting of Alexa Fluor 430.

[1383] 140. The composition according to item 122, wherein the one or more fluorophore label are selected from the group consisting of 3-perylenedodecanoic acid.

[1384] 141. The composition according to item 122, wherein the one or more fluorophore label are selected from the group consisting of 8-hydroxypyrene-1,3,6-trisulfonic acid, trisodium salt.

[1385] 142. The composition according to item 122, wherein the one or more fluorophore label are selected from the group consisting of 12-(N-(7-nitrobenz-2-oxa-1,3-diazol-4-yl)amino)dodecanoic acid.

[1386] 143. The composition according to item 122, wherein the one or more fluorophore label are selected from the group consisting of N,N-dimethyl-N-(iodoacetyl)-N-(7-nitrobenz-2-oxa-1,3-diazol-4-yl)ethylenediamine.

[1387] 144. The composition according to item 122, wherein the one or more fluorophore label are selected from the group consisting of Oregon Green 488 (difluoro carboxy fluorescein).

[1388] 145. The composition according to item 122, wherein the one or more fluorophore label are selected from the group consisting of 5-iodoacetamidofluorescein.

[1389] 146. The composition according to item 122, wherein the one or more fluorophore label are selected from the group consisting of propidium iodide-DNA adduct.

[1390] 147. The composition according to item 122, wherein the one or more fluorophore label are selected from the group consisting of Carboxy fluorescein.

[1391] 148. The composition according to any of items 86 to 120, wherein the one or more labels is a fluorescent label.

[1392] 149. The composition according to item 148, wherein the one or more fluorescent label is a simple fluorescent label.

[1393] 150. The composition according to item 149, wherein the one or more simple fluorescent label is selected from the group Fluor dyes, Pacific Blue™, Pacific Orange™, Cascade Yellow™

[1394] 151. The composition according to item 149, wherein the one or more simple fluorescent label is selected from the group AlexaFluor® (AF), AF405, AF488, AF500, AF514, AF532, AF546, AF555, AF568, AF594, AF610, AF633, AF635, AF647, AF680, AF700, AF710, AF750, AF800.

[1395] 152. The composition according to item 149, wherein the one or more simple fluorescent label is selected from the group Quantum Dot based dyes, QDot®Nanocrystals (Invitrogen, MolecularProbs), Qdot®525, Qdot®565, Qdot®585, Qdot®605, Qdot®655, Qdot®705, Qdot®800.

[1396] 153. The composition according to item 149, wherein the one or more simple fluorescent label is selected from the group DyLight™ Dyes (Pierce) (DL); DL549, DL649, DL680, DL800.

[1397] 154. The composition according to item 149, wherein the one or more simple fluorescent label is selected from the group Fluorescein (Flu) or any derivate of that, such as FITC.

[1398] 155. The composition according to item 149, wherein the one or more simple fluorescent label is selected from the group Cy-Dyes, Cy2, Cy3, Cy3.5, Cy5, Cy5.5, Cy7.

[1399] 156. The composition according to item 149, wherein the one or more simple fluorescent label is selected from the group Fluorescent Proteins, RPE, PerCp, APC, Green fluorescent proteins; GFP and GFP derivated mutant proteins; BFP, CFP, YFP, DsRed, T1, Dimer2, mRFP1, MBanana, mOrange, dTomato, tdTomato, mTangerine, mStrawberry, mCherry.

[1400] 157. The composition according to item 149, wherein the one or more simple fluorescent label is selected from the group Tandem dyes, RPE-Cy5, RPE-Cy5.5, RPE-Cy7, RPE-AlexaFluor® tandem conjugates; RPE-Alexa610, RPE-TxRed, APC-Aleca600, APC-Alexa610, APC-Alexa750, APC-Cy5, APC-Cy5.5.

[1401] 158. The composition according to item 149, wherein the one or more simple fluorescent label is selected from the group multi fluorochrome assemblies, Multiple fluorochromes attached to a polymer molecule, such as a peptide/protein, Dextrane, polysaccharide, any combination of the fluorescent dyes involving in generation of FRET (Fluorescence resonance energy transfer) based techniques.

[1402] 159. The composition according to item 149, wherein the one or more simple fluorescent label is selected from the group ionophors; ion chelating fluorescent props, props that change wavelength when binding a specific ion, such as Calcium, props that change intensity when binding to a specific ion, such as Calcium.

[1403] 160. The composition according to any of items 86 to 120, wherein the one or more labels is capable of absorption of light.

[1404] 161. The composition according to item 160, wherein the one or more labels capable of absorption of light is a chromophore.

[1405] 162. The composition according to item 160, wherein the one or more labels capable of absorption of light is a dye.

[1406] 163. The composition according to any of items 86 to 120, wherein the one or more labels is capable of emission of light after excitation.

[1407] 164. The composition according to item 163, wherein the one or more labels capable of emission of light is one or more fluorochromes.

[1408] 165. The composition according to item 164, wherein the one or more fluorochrome is selected from the AlexaFluor® (AF) family, which include AF®350, AF405, AF430, AF488, AF500, AF514, AF532, AF546, AF555, AF568, AF594, AF610, AF633, AF635, AF647, AF680, AF700, AF710, AF750 and AF800.

[1409] 166. The composition according to item 164, wherein the one or more fluorochrome is selected from the Quantum Dot (Qdot®) based dye family, which include Qdot®525, Qdot®565, Qdot®585, Qdot®605, Qdot®655, Qdot®705, Qdot®800.

[1410] 167. The composition according to item 164, wherein the one or more fluorochrome is selected from the DyLight™ Dyes (DL) family, which include DL549, DL649, DL680, DL800.

[1411] 168. The composition according to item 164, wherein the one or more fluorochrome is selected from the family of Small fluorescing dyes, which include FITC, Pacific Blue™, Pacific Orange™, Cascade Yellow™, Marina Blue™, DSred, DSred-2, 7-AAD, TO-Pro-3.

[1412] 169. The composition according to item 164, wherein the one or more fluorochrome is selected from the family of Cy-Dyes, which include Cy2, Cy3, Cy3.5, Cy5, Cy5.5, Cy7.

[1413] 170. The composition according to item 164, wherein the one or more fluorochrome is selected from the family of Phycobili Proteins, which include R-Phycoerythrin (RPE), PerCP, Allophycocyanin (APC), B-Phycoerythrin, C-Phycocyanin.

[1414] 171. The composition according to item 164, wherein the one or more fluorochrome is selected from the family of Fluorescent Proteins, which include (E)GFP and GFP ((enhanced) green fluorescent protein) derived mutant proteins; BFP, CFP, YFP, DsRed, T1, Dimer2, mRFP1, MBanana, mOrange, dTomato, tdTomato, mTangerine.

[1415] 172. The composition according to item 164, wherein the one or more fluorochrome is selected from the family of Tandem dyes with RPE, which include RPE-Cy5, RPE-Cy5.5, RPE-Cy7, RPE-AlexaFluor® tandem conjugates; RPE-Alexa610, RPE-TxRed.

[1416] 173. The composition according to item 164, wherein the one or more fluorochrome is selected from the family of Tandem dyes with APC, which include APC-Aleca600, APC-Alexa610, APC-Alexa750, APC-Cy5, APC-Cy5.5.

[1417] 174. The composition according to item 164, wherein the one or more fluorochrome is selected from the family of Calcium dyes, which include Indo-1-Ca²⁺ Indo-2-Ca²⁺.

[1418] 175. The composition according to any of items 86 to 120, wherein the one or more labels is capable of reflection of light.

[1419] 176. The composition according to item 175, wherein the one or more labels capable of reflection of light comprises gold.

[1420] 177. The composition according to item 175, wherein the one or more labels capable of reflection of light comprises plastic.

[1421] 178. The composition according to item 175, wherein the one or more labels capable of reflection of light comprises glass.

[1422] 179. The composition according to item 175, wherein the one or more labels capable of reflection of light comprises polystyrene.

[1423] 180. The composition according to item 175, wherein the one or more labels capable of reflection of light comprises pollen.

[1424] 181. The composition according to any of items 86 to 120, wherein the one or more labels is a chemiluminescent label.

[1425] 182. The composition according to item 181, wherein the chemiluminescent labels is selected from the group luminol, isoluminol, theromatic acridinium ester, imidazole, acridinium salt and oxalate ester.

[1426] 183. The composition according to any of items 86 to 120, wherein the one or more labels is a bioluminescent label.

[1427] 184. The composition according to item 183, wherein the bioluminescent labels is selected from the group luciferin, luciferase and acquorin.

[1428] 185. The composition according to any of items 86 to 120, wherein the one or more labels is a radioactive label.

[1429] 186. The composition according to item 185, wherein the one or more radioactive labels is a radionuclide.

[1430] 187. The composition according to item 185, wherein the one or more radioactive labels is an isotope.

[1431] 188. The composition according to item 185, wherein the one or more radioactive labels comprises α rays.

[1432] 189. The composition according to item 185, wherein the one or more radioactive labels comprises β rays.

[1433] 190. The composition according to item 185, wherein the one or more radioactive labels comprises γ rays.

[1434] 191. The composition according to any of items 86 to 120, wherein the one or more labels is detectable by NMR (nuclear magnetic resonance form paramagnetic molecules).

[1435] 192. The composition according to any of items 86 to 120, wherein the one or more labels is an enzyme label.

[1436] 193. The composition according to item 192, wherein the enzyme catalyze a reaction between chemicals in the near environment of the labeling molecules, producing a light signal (chemi-luminescence).

[1437] 194. The composition according to item 192, wherein the enzyme catalyzes a reaction between chemicals in the near environment of the labeling molecules, resulting in precipitation of chromophor dyes.

[1438] 195. The composition according to item 192, wherein the enzyme catalyzes a reaction between chemicals in the near environment of the labeling molecules, resulting in precipitates that can be detected by an additional layer of detection molecules.

[1439] 196. The composition according to item 192, wherein the enzyme label is selected from the group peroxidases, malate dehydrogenase, staphylococcal nuclease, delta-5-steroid isomerase, yeast alcohol dehydrogenase, alpha-glycerophosphate, dehydrogenase, triose phosphate isomerase, horseradish peroxidase, alkaline phosphatase, asparaginase, glucose oxidase, beta-galactosidase, ribonuclease, urease, catalase, glucose-6-phosphate dehydrogenase, glucoamylase and acetylcholinesterase.

[1440] 197. The composition according to item 192, wherein the enzyme label is horseradish peroxidase.

[1441] 198. The composition according to item 192, wherein the enzyme label is horseradish peroxidase and the substrate is diaminobenzidine (DAB).

[1442] 199. The composition according to item 192, wherein the enzyme label is horseradish peroxidase and the substrate is 3-amino-9-ethyl-carbazole (AEC+).

[1443] 200. The composition according to item 192, wherein the enzyme label is horseradish peroxidase and the substrate is biotinyl tyramide.

[1444] 201. The composition according to item 192, wherein the enzyme label is horseradish peroxidase and the substrate is fluorescein tyramide.

[1445] 202. The composition according to item 192, wherein the enzyme label is alkaline phosphatise.

[1446] 203. The composition according to item 192, wherein the enzyme label is alkaline phosphatase and the substrate is Fast red dye.

[1447] 204. The composition according to any of items 86 to 120, wherein the one or more labels is a ionophore or chelating chemical compound binding to specific ions such as Ca²⁺.

[1448] 205. The composition according to any of items 86 to 120, wherein the one or more labels is a lanthanide.

[1449] 206. The composition according to item 205, wherein the lanthanide comprises fluorescence.

[1450] 207. The composition according to item 205, wherein the lanthanide comprises Phosphorescence.

[1451] 208. The composition according to item 205, wherein the lanthanide is paramagnetic.

[1452] 209. The composition according to any of items 86 to 120, wherein the one or more labels is a DNA fluorescing stain.

[1453] 210. The composition according to item 209, wherein the DNA fluorescing stain is Propidium iodide.

[1454] 211. The composition according to item 209, wherein the DNA fluorescing stain is Hoechst stain.

[1455] 212. The composition according to item 209, wherein the DNA fluorescing stain is DAPI.

[1456] 213. The composition according to item 209, wherein the DNA fluorescing stain is AMC.

[1457] 214. The composition according to item 209, wherein the DNA fluorescing stain is DraQ5™.

[1458] 215. The composition according to item 209, wherein the DNA fluorescing stain is Acridine orange.

[1459] 216. The composition according to item 3, wherein the MHC-peptide complex (a-b-P) is attached to a multimerization domain comprising an avidin or streptavidin via a linkage comprising a biotin moiety.

[1460] 217. The composition according to any of items 3 to 216, wherein P and/or a and/or b is chemically modified.

[1461] 218. The composition according to any of items 3 to 216, wherein P and/or a and/or b is pegylated.

[1462] 219. The composition according to any of items 3 to 216, wherein P and/or a and/or b is phosphorylated.

[1463] 220. The composition according to any of items 3 to 216, wherein P and/or a and/or b is glycosylated.

[1464] 221. The composition according to any of items 3 to 216, wherein one of the amino acid residues of the peptide P and/or a and/or b is substituted with another amino acid.

[1465] 222. The composition according to any of items 3 to 216, wherein a and b are both full-length peptides.

[1466] 223. The composition according to any of items 3 to 216, wherein a is a full-length peptide.

[1467] 224. The composition according to any of items 3 to 216, wherein b is a full-length peptide.

[1468] 225. The composition according to any of items 3 to 216, wherein a is truncated.

[1469] 226. The composition according to any of items 3 to 216, wherein b is truncated.

[1470] 227. The composition according to any of items 3 to 216, wherein a and b are both truncated.

[1471] 228. The composition according to any of items 3 to 216, wherein a and b are covalently linked.

[1472] 229. The composition according to any of items 3 to 216, wherein a and P are covalently linked.

[1473] 230. The composition according to any of items 3 to 216, wherein b and P are covalently linked.

[1474] 231. The composition according to any of items 3 to 216, wherein a, b and P are covalently linked.

[1475] 232. The composition according to any of items 3 to 216, wherein a and b are non-covalently linked.

[1476] 233. The composition according to any of items 3 to 216, wherein a and P are non-covalently linked.

[1477] 234. The composition according to any of items 3 to 216, wherein b and P are non-covalently linked.

[1478] 235. The composition according to any of items 3 to 216, wherein a, b and P are non-covalently linked.

[1479] 236. The composition according to any of items 3 to 216, wherein a is not included in the (a-b-P) complex.

[1480] 237. The composition according to any of items 3 to 216, wherein b is not included in the (a-b-P) complex.

[1481] 238. The composition according to any of items 3 to 216, wherein P is not included in the (a-b-P) complex.

[1482] 239. The composition according to any of items 3 to 216, wherein the MHC-peptide complex is linked to at least one of the one or more multimerization domains by a linker moiety.

[1483] 240. The composition according to item 239, wherein the MHC-peptide complex is linked to at least one of the one or more multimerization domains by a covalent linker moiety.

[1484] 241. The MHC multimer according to items 239 and 240, wherein the linkage of at least one of the one or more multimerization domains and at least one MHC-peptide complexes is formed by a binding entity X attached to, or being part of, at least one of the one or more multimerization domains, and a binding entity Y attached to, or being part of at least one of the MHC-peptide complexes.

[1485] 242. The composition according to item 239 and 240, wherein the linker moiety linking at least one of the one or more multimerization domains and the MHC-peptide complex comprises the linker moiety XY, wherein the linker moiety XY results from a reaction of the moiety X comprising one or more reactive groups and the moiety Y comprising one or more reactive groups, wherein at least some of said reactive groups are capable of reacting with each other.

[1486] 243. The composition according to item 242, wherein the moiety X comprises a nucleophilic group.

[1487] 244. The composition according to item 243, wherein the nucleophilic group is selected from the group consisting of —NH₂, —OH, —SH, —NH—NH₂, —CN.

[1488] 245. The composition according to item 242, wherein the moiety Y comprises an electrophilic group.

[1489] 246. The composition according to item 245, wherein the electrophilic group is selected from the group consisting of CHO, COOH, CO, NHS-ester, tosyl activated ester, acidanhydride other activated esters.

[1490] 247. The MHC multimer according to items 239 and 240, wherein at least one of the reactive groups on one of the moieties X and Y comprises a radical capable of reacting with a reactive group forming part of the other moiety.

[1491] 248. The MHC multimer according to items 239 and 240, wherein X and Y comprises reactive groups natively associated with the one or more multimerization domains and/or the MHC-peptide complexes.

[1492] 249. The MHC multimer according to items 239 and 240, wherein X and Y comprises reactive groups not natively associated with the one or more multimerization domains and/or the MHC-peptide complex.

[1493] 250. The MHC multimer according to items 239 and 240, wherein the linker moiety forms a covalent link between at least one of the one or more multimerization domains and at least one of the MHC-peptide complexes.

[1494] 251. The MHC multimer according to items 239 and 240, wherein the reactive groups of MHC-peptide complexes include amino acid side chains selected from the group —NH₂, —OH, —SH, and —NH—.

[1495] 252. The MHC multimer according to items 239 and 240, wherein the reactive groups of multimerization domains include hydroxyls of polysaccharides such as dextrans.

[1496] 253. The MHC multimer according to items 239 and 240, wherein the reactive groups of multimerization domains selected from the group amino acid side chains comprising —NH₂, —OH, —SH, and —NH— of polypeptides.

[1497] 254. The MHC multimer according to items 239 and 240, wherein one of the polypeptides of the MHC-peptide complex is covalently or non-covalently linked by a protein fusion to the multimerization domain.

[1498] 255. The MHC multimer according to items 239 and 240, wherein one of the polypeptides of the MHC-peptide complex is linked by a protein fusion to the multimerization domain, wherein an acyl group and an amino group react to form an amide bond.

[1499] 256. The composition according to item 3, wherein one of the polypeptides of the MHC-peptide complex is a β2M polypeptide.

[1500] 257. The composition according to item 3, wherein one of the polypeptides of the MHC-peptide complex is a MHC I heavy chain polypeptide.

[1501] 258. The composition according to item 3, wherein one of the polypeptides of the MHC-peptide complex is an antigenic peptide.

[1502] 259. The composition according to item 3, wherein one of the polypeptides of the MHC-peptide complex is a MHC II α-chain polypeptide.

[1503] 259. The composition according to item 3, wherein one of the polypeptides of the MHC-peptide complex is a MHC II β-chain polypeptide

[1504] 260. The composition according to item 3, wherein one of the polypeptides of the MHC-peptide complex is linked by non-native reactive groups to the multimerization domain

[1505] 261. The composition according to item 260, wherein the non-native reactive groups include reactive groups that are attached to the multimerization domain through association of a linker molecule comprising the reactive group.

[1506] 262. The composition according to item 260, wherein the non-native reactive groups include reactive groups that are attached to the MHC-peptide complex through association of a linker molecule comprising the reactive group.

[1507] 263. The composition according to item 18, wherein dextran is activated by reaction of the dextran hydroxyls with divinyl sulfon

[1508] 264. The composition according to item 263, wherein dextran is activated by a multistep reaction that results in the decoration of the dextran with maleimide groups

[1509] 265. The composition according to item 3, wherein the multimerization domain comprises one or more nucleophilic groups

[1510] 266. The composition according to item 265, wherein the nucleophilic group is selected from the group —NH₂, —OH, —SH, —CN, —NH—NH₂

[1511] 267. The composition according to item 3, wherein the multimerization domain is selected from the group polysaccharides, polypeptides comprising e.g. lysine, serine, and cysteine.

[1512] 268. The composition according to item 3, wherein the multimerization domain comprises one or more electrophilic groups.

[1513] 269. The composition according to item 268, wherein the electrophilic group is selected from the group —COOH, —CHO, —CO, NHS-ester, tosyl-activated ester, and other activated esters, acid-anhydrides.

[1514] 270. The composition according to item 3, wherein the multimerization domain is selected from the group of polypeptides comprising e.g. glutamate and aspartate, or vinyl sulfone activated dextran.

[1515] 271. The composition according to item 3, wherein the multimerization domain comprises one or more radicals.

[1516] 272. The composition according to item 3, wherein the multimerization domain comprises one or more conjugated double bonds.

[1517] 273. The composition according to item 3, wherein the MHC-peptide complex comprises one or more nucleophilic groups.

[1518] 274. The composition according to item 273, wherein the nucleophilic group is selected from the group —NH₂, —OH, —SH, —CN, —NH—NH₂.

[1519] 275. The composition according to item 3, wherein the MHC-peptide complex comprises one or more electrophilic groups.

[1520] 276. The composition according to item 275, wherein the electrophilic group is selected from the group —COOH, —CHO, —CO, NHS-ester, tosyl-activated ester, and other activated esters, acid-anhydrides.

[1521] 277. The composition according to item 3, wherein the MHC-peptide complex comprises one or more radicals.

[1522] 278. The composition according to item 3, wherein the MHC-peptide complex comprises one or more conjugated double bonds

[1523] 279. The composition according to item 3, wherein the multimerization domain comprises one or more beads and one or more linker moieties.

[1524] 280. The composition according to item 279, wherein the linker is a flexible linker.

[1525] 281. The composition according to item 279, wherein the linker is a rigid linker.

[1526] 282. The composition according to item 279, wherein the linker is a water-soluble linker.

[1527] 283. The composition according to item 279, wherein the linker is a cleavable linker.

[1528] 284. The composition according to item 283, wherein the cleavable linker is selected from linkers depicted in (FIG. 2) in PCT/DK2008/050167.

[1529] 285. The composition according to item 283, wherein the cleavable linker is cleavable at physiological conditions

[1530] 286. The MHC multimer according to item 3, wherein the MHC-peptide complex is linked to at least one of the one or more multimerization domains by a non-covalent linker moiety.

[1531] 287. The composition according to item 286, wherein the non-covalent linkage comprises natural dimerization.

[1532] 288. The composition according to item 287, wherein the natural dimerization comprises antigen-antibody pairs or coiled coil structures.

[1533] 289. The composition according to item 287, wherein the natural dimerization comprises DNA-DNA interactions.

[1534] 290. The composition according to item 286, wherein the non-covalent linkage comprises natural interactions.

[1535] 291. The composition according to item 290, wherein the natural interaction comprises biotin and streptavidin.

[1536] 292. The composition according to item 26, wherein the bead is coated with streptavidin monomers, which in turn are associated with biotinylated MHC complexes

[1537] 293. The composition according to item 26, wherein the bead is coated with streptavidin tetramers each of which being independently associated with 0, 1, 2, 3, or 4 biotinylated MHC complexes

[1538] 294. The composition according to item 26, wherein the bead is coated with polysaccharide, such as a polysaccharide comprising dextran moieties.

[1539] 295. The composition according to item 290, wherein the natural interaction comprises the interaction of MHC complexes (comprising full-length polypeptide chains, including the transmembrane portion) with the cell membrane of for example dendritic cells

[1540] 296. The composition according to item 286, wherein the non-covalent linkage comprises artificial interactions

[1541] 297. The composition according to item 296, wherein the artificial interaction comprises His₆ tag interacting with Ni-NTA

[1542] 298. The composition according to item 296, wherein the artificial interaction comprises PNA-PNA

[1543] 299. The composition according to item 286, wherein the non-covalent linkage comprises non-specific adsorption

[1544] 300. The composition according to item 299, wherein the non-specific adsorption comprises adsorption of proteins onto surfaces

[1545] 301. The composition according to item 286, wherein the non-covalent linkage comprises the pentamer structure

[1546] 302. The composition according to item 286, wherein the non-covalent linkage comprises interactions selected from the group streptavidin/biotin, avidin/biotin, antibody/antigen, DNA/DNA, DNA/PNA, DNA/RNA, PNA/PNA, LNA/DNA, leucine zipper e.g. Fos/Jun, IgG dimeric protein, IgM multivalent protein, acid/base coiled-coil helices, chelate/metal ion-bound chelate, streptavidin (SA) and avidin and derivatives thereof, biotin, immunoglobulins, antibodies (monoclonal, polyclonal, and recombinant), antibody fragments and derivatives thereof, leucine zipper domain of AP-1 (jun and fos), hexa-his (metal chelate moiety), hexa-hat GST (glutathione S-transferase) glutathione affinity, Calmodulin-binding peptide (CBP), Strep-tag, Cellulose Binding Domain, Maltose Binding Protein, S-Peptide Tag, Chitin Binding Tag, Immuno-reactive Epitopes, Epitope Tags, E2Tag, HA Epitope Tag, Myc Epitope, FLAG Epitope, AU1 and AU5 Epitopes, Glu-Glu Epitope, KT3 Epitope, IRS Epitope, Btag Epitope, Protein Kinase-C Epitope, VSV Epitope, lectins that mediate binding to a diversity of compounds, including carbohydrates, lipids and proteins, e.g. Con A (Canavalia ensiformis) or WGA (wheat germ agglutinin) and tetranectin or Protein A or G (antibody affinity).

[1547] 303. The composition according to any of items 3 to 302, wherein the MHC multimer comprises stabilized empty MHC complexes and/or stabilized MHC-peptide complexes.

[1548] 304. The composition according to item 303, wherein the MHC multimer comprises a soluble form of MHC I where the transmembrane and cytosolic domains of the membrane-anchored MHC complexes have been removed.

[1549] 305. The composition according to item 303, wherein the MHC multimer comprises a soluble form of MHC II where the transmembrane and cytosolic domains of the membrane-anchored MHC complexes have been removed.

[1550] 306. The composition according to item 303, wherein the stabilized empty MHC complexes and/or stabilized MHC-peptide complexes have been stabilized by generation of covalent protein-fusions.

[1551] 307. The composition according to item 303, wherein the stabilized empty MHC complexes and/or stabilized MHC-peptide complexes have been stabilized by stabilization of the MHC I molecules by introduction of one or more linkers between the individual components of the MHC I complex such as generation of a complex consisting of a heavy chain fused with β2m through a linker and a soluble peptide, a heavy chain fused to β2m through a linker, a heavy chain β2m dimer covalently linked to a peptide through a linker to either heavy chain or β2m, or where there can or can not be a linker between the heavy chain and β2m, a heavy chain fused to a peptide through a linker, or the α1 and α2 subunits of the heavy chain fused to a peptide through a linker.

[1552] 308. The composition according to item 307, wherein each of the heavy chain, β2m and the peptide are truncated.

[1553] 309. The composition according to item 307, wherein the linker is a flexible linker.

[1554] 310. The composition according to item 307, wherein the linker is made of glycine and/or serine.

[1555] 311. The composition according to item 307, wherein the linker is between 5-20 residues long, such as from 5-6 residues long, for example from 6-8 residues long, such as from 8-10 residues long, for example from 10-12 residues long, such as from 12-14 residues long, for example from 14-16 residues long, such as from 16-18 residues long and for example from 18-20 residues long.

[1556] 312. The composition according to item 307, wherein the linker is longer than 20 residues long.

[1557] 313. The composition according to item 307, wherein the linker is shorter than 5 residues long.

[1558] 314. The composition according to item 307, wherein the linker is rigid with a defined structure.

[1559] 315. The composition according to item 307, wherein the linker is made of amino acids like glutamate, alanine, lysine, and leucine creating e.g. a more rigid structure.

[1560] 316. The composition according to item 303, wherein the stabilized empty MHC complexes and/or stabilized MHC-peptide complexes comprises heavy chain-β2m fusion proteins, wherein the COOH terminus of β2m can be covalently linked to the NH₂ terminus of the heavy chain, or the NH₂ terminus of β2m can be linked to the COOH terminus of the heavy chain.

[1561] 317. The composition according to item 303, wherein the stabilized empty MHC complexes and/or stabilized MHC-peptide complexes comprises a fusion-protein comprising a β2m domain, or a truncated β2m domain, inserted into the heavy chain.

[1562] 318. The composition according to item 303, wherein the stabilized empty MHC complexes and/or stabilized MHC-peptide complexes comprises a fusion-protein comprising a heavy chain domain, or a truncated heavy chain, inserted into the β2m chain, to form a fusion-protein of the form “β2m(first part)-heavy chain-β2m(last part)”.

[1563] 319. The composition according to item 303, wherein the stabilized empty MHC complexes and/or stabilized MHC-peptide complexes comprises peptide-β2m fusion proteins, wherein the COOH terminus of the peptide is linked to the NH₂ terminus of β2m or the peptide is linked to the COOH terminal of β2m via its NH₂ terminus.

[1564] 320. The composition according to item 303, wherein the stabilized empty MHC complexes and/or stabilized MHC-peptide complexes comprises heavy chain-peptide fusion proteins, wherein the NH₂ terminus of the heavy chain is fused to the COOH terminus of the peptide, or the fusion is between the COOH terminus of the heavy chain and the NH₂ terminus of the peptide.

[1565] 321. The composition according to item 303, wherein the stabilized empty MHC complexes and/or stabilized MHC-peptide complexes comprises heavy chain-β2m-peptide fusion proteins, wherein the NH₂ terminus of the heavy chain is fused to the COOH terminus of β2m and the NH₂ terminus of β2m can be fused to the COOH terminus of the peptide.

[1566] 322. The composition according to item 303, wherein the stabilized empty MHC complexes and/or stabilized MHC-peptide complexes comprises non-covalent stabilization by binding to an unnatural component.

[1567] 323. The composition according to item 322, wherein the unnatural component bind to both the heavy chain and the β2m.

[1568] 324. The composition according to item 322, wherein the unnatural component bind to either β2m or heavy chain, and in this way stabilize the polypeptide in its correct conformation, and in this way increase the affinity of the heavy chain for β2m and/or peptide, or increase the affinity of β2m for peptide.

[1569] 325. The composition according to item 322, wherein the unnatural component is one or more antibodies.

[1570] 326. The MHC multimer according to claim 325, wherein the one or more antibodies can be selected from the group consisting of as truncated or full-length antibodies (of isotype IgG, IgM, IgA, IgE), Fab, scFv or bi-Fab fragments or diabodies.

[1571] 327. The MHC multimer according to claim 325, wherein the one or more antibodies is one or more antibodies capable of binding the MHC I molecule by interaction with the heavy chain as well as β2m.

[1572] 328. The MHC multimer according to claim 325, wherein the one or more antibodies is one or more bispecific antibodies that binds with one arm to the heavy chain and the other arm to the β2m of the MHC complex.

[1573] 329. The MHC multimer according to claim 325, wherein the one or more antibodies is monospecific, and bind at the interface between heavy chain and β2m.

[1574] 330. The MHC multimer according to claim 325, wherein the one or more antibodies is one or more antibodies capable of binding the heavy chain but only when the heavy chain is correct folded.

[1575] 331. The MHC multimer according to claim 325, wherein the one or more antibodies is the antibody produced by the clone W6/32 such as M0736 or the like that recognizes a conformational epitope on intact human and some monkey MHC complexes comprising β2m, heavy chain and peptide.

[1576] 332. The composition according to item 322, wherein the unnatural component is one or more peptides.

[1577] 333. The composition according to item 322, wherein the unnatural component is one or more aptamers.

[1578] 334. The composition according to item 322, wherein the unnatural component is one or more molecules with the ability to bind peptides stretches of the MHC complex.

[1579] 335. The composition according to item 303, wherein the stabilized empty MHC complexes and/or stabilized MHC-peptide complexes comprises generation of modified proteins or protein components.

[1580] 336. The composition according to item 303, wherein the stabilized empty MHC complexes and/or stabilized MHC-peptide complexes comprises improved stability of a MHC I complex by increasing the affinity of the binding peptide for the MHC complex.

[1581] 337. The composition according to item 335, wherein the generation of modified proteins or protein components comprises mutagenesis of one or more amino acids at relevant positions in the peptide.

[1582] 338. The composition according to item 335, wherein the generation of modified proteins or protein components comprises substitution of one or more amino acids at relevant positions in the peptide.

[1583] 339. The composition according to item 335, wherein the generation of modified proteins or protein components comprises chemical modifications of amino acids at relevant positions in the peptide.

[1584] 340. The composition according to item 335, wherein the generation of modified proteins or protein components comprises introduction by synthesis of non-natural amino acids at relevant positions in the peptide.

[1585] 341. The composition according to item 335, wherein the generation of modified proteins or protein components comprises mutations, chemical modifications, insertion of natural or non-natural amino acids or deletions in the peptide binding cleft, i.e. in the binding pockets that accommodate peptide side chains responsible for anchoring the peptide to the peptide binding cleft.

[1586] 342. The composition according to item 335, wherein the generation of modified proteins or protein components comprises introduction of one or more reactive groups into the antigenic peptide;

[1587] 343. The composition according to item 335, wherein the generation of modified proteins or protein components comprises mutations, chemical modifications, insertion of natural or non-natural amino acids or deletions in the heavy chain and/or β2m at positions outside the peptide-binding cleft.

[1588] 344. The composition according to item 335, wherein the generation of modified proteins or protein components comprises removal of “unwanted cysteine residues” in the heavy chain by mutation, chemical modification, amino acid exchange or deletion.

[1589] 345. The composition according to item 303, wherein the stabilized empty MHC complexes and/or stabilized MHC-peptide complexes comprises covalent stabilization of MHC I complex, wherein a linker is covalently attached between two of the subunits of the MHC complex such as a linker between peptide and heavy chain or between heavy chain and beta2 microglobulin.

[1590] 346. The composition according to item 303, wherein the stabilized empty MHC complexes and/or stabilized MHC-peptide complexes comprises eukaryotic expression systems for production of MHC II molecules such as stable Drosophila cell transfectants, baculovirus infected insect cells, CHO cells or other mammalian cell lines suitable for expression of proteins.

[1591] 347. The composition according to item 303, wherein the stabilized empty MHC complexes and/or stabilized MHC-peptide complexes comprises generation of covalent protein-fusions.

[1592] 348. The composition according to item 303, wherein the stabilized empty MHC complexes and/or stabilized MHC-peptide complexes comprises stabilization of MHC II complexes by introduction of one or more linkers e.g. between the individual components of the MHC II complex such as a α/β dimer with a linker between α-chain and β-chain; a α/β dimer covalently or non-covalently linked to the peptide via a linker to either the α-chain or β-chain; a α/β dimer, covalently or non-covalently linked by a linker between the α-chain and β-chain, and where the dimer is covalently or non-covalently linked to the peptide or a α/β dimer with a linker between α-chain and β-chain, where the dimer is combined with a peptide covalently or non-covalently linked to either α-chain or β-chain.

[1593] 349. The composition according to item 348, wherein the linker is a flexible linker.

[1594] 350. The composition according to item 348, wherein the linker is made of glycine and/or serine.

[1595] 351. The composition according to item 348, wherein the linker is between 5-20 residues long, such as from 5-6 residues long, for example from 6-8 residues long, such as from 8-10 residues long, for example from 10-12 residues long, such as from 12-14 residues long, for example from 14-16 residues long, such as from 16-18 residues long and for example from 18-20 residues long.

[1596] 352. The composition according to item 348, wherein the linker is longer than 20 residues long.

[1597] 353. The composition according to item 348, wherein the linker is shorter than 5 residues long.

[1598] 354. The composition according to item 348, wherein the linker is rigid with a more defined structure, e.g. made of amino acids like glutamate, alanine, lysine, and leucine.

[1599] 355. The composition according to item 303, wherein the stabilized empty MHC complexes and/or stabilized MHC-peptide complexes comprises peptides linked to the NH₂- or COOH-terminus of either α-chain or β-chain.

[1600] 356. The composition according to item 303, wherein the stabilized empty MHC complexes and/or stabilized MHC-peptide complexes comprises peptides linked to the NH₂-terminus of the β-chain via their COOH-terminus, since the linker required is shorter than if the peptide is linked to the COOH-terminus of the β-chain.

[1601] 357. The composition according to item 303, wherein the stabilized empty MHC complexes and/or stabilized MHC-peptide complexes comprises linkage of α-chain to β-chain via the COOH-terminus of the β-chain to the NH₂-terminus of the α-chain or from the COOH-terminus of the α-chain to the NH₂-terminus of the β-chain.

[1602] 358. The composition according to item 303, wherein the stabilized empty MHC complexes and/or stabilized MHC-peptide complexes comprises a three-molecule fusion protein consisting of α-chain, β-chain and peptide e.g. where one linker connect the COOH-terminus of the β-chain with the NH₂-terminus of the α-chain and another linker connects the COOH-terminal of the peptide with the NH₂-terminal of the β-chain or one linker joins the COOH-terminus of the α-chain with the NH₂-terminus of the β-chain and the second linker joins the NH₂-terminus of the peptide with the COOH-terminus of the β-chain.

[1603] 359. The composition according to item 303, wherein the stabilized empty MHC complexes and/or stabilized MHC-peptide complexes comprises non-covalent stabilization by binding ligand.

[1604] 360. The composition according to item 303, wherein the stabilized empty MHC complexes and/or stabilized MHC-peptide complexes comprises non-covalent binding of ligands to the MHC II complex to promote assembly of α- and β-chain by bridging the two chains, or by binding to either of the α- or β-chains, and in this way stabilize the conformation of α or β, that binds β or α, respectively, and/or that binds the peptide.

[1605] 361. The composition according to item 360, wherein the ligands are one or more antibodies.

[1606] 362. The composition according to item 361, wherein the one or more antibodies are one or more antibodies binding the MHC complex distal to the interaction site with TCR, i.e. distal to the peptide-binding cleft.

[1607] 363. The composition according to item 361, wherein the one or more antibodies are any truncated or full length antibody of any isotype (e.g. IgG, IgM, IgA or IgE), a bi-Fab fragment or a diabody.

[1608] 364. The composition according to item 361, wherein the one or more antibodies are bispecific with one arm binding to the α-chain and the other arm binding to the β-chain.

[1609] 365. The composition according to item 361, wherein the one or more antibodies are monospecific and directed to a sequence fused to the α-chain as well as to the β-chain.

[1610] 366. The composition according to item 361, wherein the one or more antibodies are monospecific and binds to a surface of the complex that involves both the α- and β-chain, e.g. both the α2- and β2-domain or both the α1- and β1-domain.

[1611] 367. The composition according to item 360, wherein the ligands are one or more peptides.

[1612] 368. The composition according to item 360, wherein the ligands are one or more aptamers.

[1613] 369. The composition according to item 360, wherein the ligands are one or more molecules with the ability to bind proteins.

[1614] 370. The composition according to item 360, wherein the ligands are one or more ligand that binds at the α-/β-chain interface, e.g. peptides and aptamers.

[1615] 371. The composition according to item 360, wherein the ligands are one or more ligands that bind the peptide, although, in this case it is important that the ligand does not interfere with the interaction of the peptide or binding cleft with the TCR.

[1616] 372. The composition according to item 303, wherein the stabilized empty MHC complexes and/or stabilized MHC-peptide complexes comprises non-covalent stabilization by induced multimerization.

[1617] 373. The composition according to item 372, wherein the multimerization comprises anchoring of the α- and β-chains in the cell membrane leading to stabilization of the MHC II complexes.

[1618] 374. The composition according to item 372, wherein the multimerization comprises stabilization of the α/β-dimer by attachment of the MHC II chains to the Fc regions of an antibody, leading to a stable α/β-dimer, where α and β are held together by the tight interactions between two Fc domains of an antibody.

[1619] 375. The composition according to item 372, wherein the multimerization comprises one or more dimerization domains.

[1620] 376. The composition according to item 372, wherein the multimerization comprises MHC II molecules incorporated into artificial membrane spheres like liposomes or lipospheres.

[1621] 377. The composition according to item 372, wherein the multimerization comprises MHC II molecules incorporated as monomers or as dimers in a membrane.

[1622] 378. The composition according to item 372, wherein the multimerization comprises biotinylation of α- as well as β-chain and the two chains brought together by binding to streptavidin.

[1623] 379. The composition according to item 372, wherein the multimerization comprises long flexible linkers such as extended glycine-serine tracts used to extend both chains, whereafter the chains are biotinylated at the end of such extended linkers and streptavidin is used as a scaffold to bring the chains together in the presence of the peptide, while the flexible linkers still allow the chains to orientate properly.

[1624] 380. The composition according to item 303, wherein the stabilized empty MHC complexes and/or stabilized MHC-peptide complexes comprises generation of modified proteins or protein components.

[1625] 381. The composition according to item 303, wherein the stabilized empty MHC complexes and/or stabilized MHC-peptide complexes comprises stabilization of MHC II complexes by covalent modifications of the protein.

[1626] 382. The composition according to item 303, wherein the stabilized empty MHC complexes and/or stabilized MHC-peptide complexes comprises increase of the affinity of the peptide for the MHC complex e.g. by exchange of the natural amino acids with other natural or non-natural amino acids at relevant positions in the peptide or by chemical modifications of amino acids at relevant positions in the peptide or mutations, chemical modifications, insertion of natural or non-natural amino acids or deletions can be introduced in the peptide-binding cleft or mutations, chemical modifications, insertion of natural or non-natural amino acids or deletions is introduced in α- and/or β-chain at positions outside the peptide-binding cleft.

[1627] 383. The composition according to item 303, wherein the stabilized empty MHC complexes and/or stabilized MHC-peptide complexes comprises replacement of the hydrophobic transmembrane regions of α-chain and β-chain by leucine zipper dimerisation domains (e.g. Fos-Jun leucine zipper; acid-base coiled-coil structure) to promote assembly of α-chain and β-chain.

[1628] 384. The composition according to item 303, wherein the stabilized empty MHC complexes and/or stabilized MHC-peptide complexes comprises introduction of one or more cysteine residues by amino acid exchange at the COOH-terminal of both α-chain and β-chain, to create disulfide bridges between the two chains upon assembly of the MHC complex.

[1629] 385. The composition according to item 303, wherein the stabilized empty MHC complexes and/or stabilized MHC-peptide complexes comprises removal of “unwanted cysteine residues” in either of the chains by mutation, chemical modification, amino acid exchange or deletion.

[1630] 386. The composition according to item 303, wherein the stabilized empty MHC complexes and/or stabilized MHC-peptide complexes comprises stabilization of MHC II complexes by chemically linking together the subunits and the peptide e.g. by a linker between peptide and α-chain, between peptide and β-chain, between α-chain and β-chain, or combination thereof.

[1631] 387. The composition according to item 303, wherein the stabilized empty MHC complexes and/or stabilized MHC-peptide complexes comprises chemically modified MHC complexes.

[1632] 388. The composition according to item 387, wherein the chemically modified MHC complexes comprises one or more amino acids reacted with one or more chemical cross linkers.

[1633] 389. The composition according to item 387, wherein the chemically modified MHC complexes comprises that the amino group at the N-terminal of both chains and of the peptide, as well as amino groups of lysine side chains, are nucleophilic and can be used in a chemical reaction.

[1634] 390. The composition according to item 389, wherein the chemical reaction is nucleophilic substitution by activation of electrophiles (e.g. acylation such as amide formation, pyrazolone formation, isoxazolone formation; alkylation; vinylation; disulfide formation),

[1635] 391. The composition according to item 389, wherein the chemical reaction is addition to carbon-hetero multiple bonds (e.g. alkene formation by reaction of phosphonates with aldehydes or ketones; arylation; alkylation of arenes/hetarenes by reaction with alkyl boronates or enolethers).

[1636] 392. The composition according to item 389, wherein the chemical reaction is nucleophilic substitution using activation of nucleophiles (e.g. condensations; alkylation of aliphatic halides or tosylates with enolethers or enamines).

[1637] 393. The composition according to item 389, wherein the chemical reaction is one or more cycloadditions.

[1638] 394. The composition according to item 389, wherein the chemical reaction comprises use of activated carboxylic acids such as NHS-ester, tetra and pentafluoro phenolic esters, anhydrides, acid chlorides and fluorides.

[1639] 395. The composition according to item 389, wherein the chemical reaction comprises use of sulphonyl chlorides.

[1640] 396. The composition according to item 389, wherein the chemical reaction comprises use of iso-Cyanates and/or isothiocyanates.

[1641] 397. The composition according to item 389, wherein the chemical reaction comprises use of Aldehydes, such as formaldehyde and glutardialdehyde.

[1642] 398. The composition according to item 389, wherein the chemical reaction comprises alkylation by maleimides, vinyl sulphones and halides.

[1643] 399. The composition according to item 389, wherein the chemical reaction comprises use of carboxylic acids at the C-terminal of both chains and peptide, as well as on the side chains of glutamic and aspartic acid, to introduce cross-links.

[1644] 400. The composition according to item 389, wherein the chemical reaction use of carbodiimides.

[1645] 401. The composition according to item 389, wherein the chemical reaction any chemistries that can be employed to form covalent cross-links.

[1646] 402. The composition according to item 389, wherein the chemical reaction comprises one or more chemical reagents that are bi-functional.

[1647] 403. The composition according to item 389, wherein the chemical reaction comprises one or more chemical reagents that are homo bi-functional such as glutardialdehyde.

[1648] 404. The composition according to item 389, wherein the chemical reaction comprises one or more chemical reagents that are hetero bi-functional such as GMBS (MaleimidoButyryloxy-Succinimide ester).

[1649] 405. The composition according to item 389, wherein the chemical reaction comprises use of two or more reagents.

[1650] 406. The composition according to item 389, wherein the chemical reaction comprises that GMBS is used to introduce maleimides on the α-chain, and iminothiolane is used to introduce thiols on the β-chain, whereafter the malemide and thiol can then form a thioether link between the two chains.

[1651] 407. The composition according to item 389, wherein the chemical reaction comprises one or more types of cross-links.

[1652] 408. The composition according to item 389, wherein the chemical reaction comprises that the folded MHC-complex can be reacted with dextrans possessing a large number (up to many hundreds) of vinyl sulphones, which can react with lysine residues on both the α and β chains as well as with lysine residues on the peptide protruding from the binding site, effectively cross linking the entire MHC-complex.

[1653] 409. The composition according to item 389, wherein the chemical reaction comprises activation of dextran e.g. with vinyl sulphones.

[1654] 410. The composition according to item 389, wherein the chemical reaction comprises that a dextran is reacted both with one or several MHC-complexes and one or more fluorescent protein such as APC.

[1655] 411. The composition according to item 389, wherein the chemical reaction comprises one or more chemical cross linkers.

[1656] 412. The composition according to item 389, wherein the chemical reaction comprises that one or more lysine residues are inserted into the α-chain, juxtaposed with glutamic acids in the β-chain, where after the introduced amino groups and carboxylic acids are reacted by addition of carbodiimide.

[1657] 413. The composition according to item 389, wherein the chemical reaction comprises that one or more dextran multimerization domain(s) are cross-linked with appropriately modified MHC-complexes; i.e. one or both chains of the MHC complex can be enriched with lysine residues, increasing reactivity towards the vinylsulphone dextran.

[1658] 414. The composition according to item 413, wherein the lysine residues are inserted at positions opposite the peptide binding cleft, orienting the MHC-complexes favourably for T-cell recognition.

[1659] 415. The composition according to item 389, wherein the chemical reaction comprises use of one or more extended and flexible cross-linkers.

[1660] 416. The composition according to item 303, wherein the stabilized empty MHC complexes and/or stabilized MHC-peptide complexes comprises stabilization with one or more soluble additives.

[1661] 417. The composition according to item 416, wherein the one or more soluble additives comprises one or more salts.

[1662] 418. The composition according to item 416, wherein the one or more soluble additives comprises one or more detergents.

[1663] 419. The composition according to item 416, wherein the one or more soluble additives comprises one or more organic solvents.

[1664] 420. The composition according to item 416, wherein the one or more soluble additives comprises one or more polymers.

[1665] 421. The composition according to item 416, wherein the one or more soluble additives comprises one or more soluble additives that increase the stability of MHC complexes.

[1666] 422. The composition according to item 416, wherein the one or more soluble additives comprises one or more soluble additives that increase the surface tension of the MHC complex.

[1667] 423. The composition according to item 416, wherein the one or more soluble additives comprises one or more of the soluble additives selected from the group consisting of sucrose, mannose, glycine, betaine, alanine, glutamine, glutamic acid, ammonium sulphate, glycerol, mannitol and sorbitol.

[1668] 424. The composition according to item 416, wherein the one or more soluble additives comprises one or more soluble additives that increase the surface tension of the MHC complex and simultaneously can interact with charged groups in the protein.

[1669] 425. The composition according to item 416, wherein the one or more soluble additives comprises one or more of the soluble additives selected from the group consisting of MgSO₄, NaCl, polyethyleneglycol, 2-methyl-2,4-pentanediol and guanidiniumsulphate.

[1670] 426. The composition according to item 416, wherein the one or more soluble additives comprises molar excess of peptide.

[1671] 427. The composition according to item 416, wherein the one or more soluble additives comprises molar excess β2m.

[1672] 428. The composition according to item 416, wherein the one or more soluble additives comprises molar excess β2m and molar excess of peptide identical to the peptide bound in the peptide-binding cleft.

[1673] 429. The composition according to item 416, wherein the one or more soluble additives comprises one or more of the soluble additives selected from the group consisting of BSA, fetal and bovine calf serum, and other protein components in serum with a protein stabilizing effect.

[1674] 430. The composition according to item 416, wherein the one or more soluble additives are added to any solution comprising MHC complexes in order to increase the stability of the molecule.

[1675] 431. The composition according to item 416, wherein the one or more soluble additives are added during the refolding process.

[1676] 432. The composition according to item 416, wherein the one or more soluble additives are added to the formed MHC complex.

[1677] 433. The composition according to item 416, wherein the one or more soluble additives are added to a solution of MHC multimers comprising several MHC complexes.

[1678] 434. The composition according to any of items 3 to 303 further comprising one or more molecules with adjuvant effect.

[1679] 435. The composition according to any of items 3 to 303 further comprising one or more immune targets.

[1680] 436. The MHC multimer according to any of item 435, wherein the one or more immune targets is an antigen.

[1681] 437. The composition according to any of items 3 to 303 further comprising one or more molecules with biological activity.

[1682] 438. The composition according to any of items 3 to 303 further comprising one or more molecules with a cytotoxic effect.

[1683] 439. The composition according to any of items 3 to 303 further comprising one or more molecules selected from the group consisting of enzymes, regulators of receptor activity, receptor ligands, immune potentiators, drugs, toxins, co-receptors, proteins, peptides, sugar moieties, lipid groups, nucleic acids including siRNA, nano particles, and small molecules.

[1684] 440. The composition according to any of items 3 to 303 further comprising one or more molecules selected from the group consisting of HIV gp120, HIV-GAG gp 27, HSP70, and MHC class II proteins or peptides or combinations thereof.

[1685] 441. The composition according to any of items 3 to 303 further comprising one or more immuno active molecules.

[1686] 442. The composition according to item 441, wherein the one or more immuno active molecules are identical.

[1687] 443. The composition according to item 441, wherein the one or more immuno active molecules are different.

[1688] 444. The composition according to item 441, wherein the one or more immuno active molecules are selected from the group consisting of biological active molecules including proteins, co-stimulatory molecules, cell modulating molecules, receptors, accessory molecules, adhesion molecules, natural ligands, and toxic molecules, as well as antibodies and recombinant binding molecules to any of the foregoing, and combinations thereof.

[1689] 445. The composition according to item 441, wherein the one or more immuno active molecules comprises one or more molecules selected from the group consisting of MHC Class I-like proteins like MIC A, MIC B, CDId, HLA E, HLA F, HLA G, HLA H, ULBP-1, ULBP-2, and ULBP-3, co-stimulatory molecules such as CD2, CD3, CD4, CD5, CD8, CD9, CD27, CD28, CD30, CD69, CD134 (OX40), CD137 (4-1BB), CD147, CDw150 (SLAM), CD152 (CTLA-4), CD153 (CD30L), CD40L (CD154), NKG2D, ICOS, HVEM, HLA Class II, PD-1, Fas (CD95), FasL expressed on T and/or NK cells, CD40, CD48, CD58, CD70, CD72, B7.1 (CD80), B7.2 (CD86), B7RP-1, B7-H3, PD-L1, PD-L2, CD134L, CD137L, ICOSL, LIGHT expressed on APC and/or tumour cells, cell modulating molecules such as CD16, NKp30, NKp44, NKp46, NKp80, 2B4, KIR, LIR, CD94/NKG2A, CD94/NKG2C expressed on NK cells, IFN-alpha, IFN-beta, IFN-gamma, IL-1, IL-2, IL-3, IL-4, IL-6, IL-7, IL-8, IL-10, IL-11, IL-12, IL-15, CSFs (colony-stimulating factors), vitamin D3, IL-2 toxins, cyclosporin, FK-506, rapamycin, TGF-beta, clotrimazole, nitrendipine, and charybdotoxin, accessory molecules such as LFA-1, CDIIa/18, CD54 (ICAM-1), CD106 (VCAM), and CD49a, b, c, d, e, f/CD29 (VLA-4), adhesion molecules such as ICAM-1, ICAM-2, GlyCAM-1, CD34, anti-LFA-1, anti-CD44, anti-beta7, chemokines, CXCR4, CCR5, anti-selectin L, anti-selectin E, and anti-selectin P, toxic molecules selected from toxins, enzymes, antibodies, radioisotopes, chemiluminescent substances, bioluminescent substances, polymers, metal particles, and haptens, such as cyclophosphamide, methotrexate, Azathioprine, mizoribine, 15-deoxyspergualin, neomycin, staurosporine, genestein, herbimycin A, Pseudomonas exotoxin A, saporin, Rituxan, Ricin, gemtuzumab ozogamicin, Shiga toxin, heavy'metals like inorganic and organic mercurials, and FN18-CRM9, radioisotopes such as incorporated isotopes of iodide, cobalt, selenium, tritium, and phosphor, and haptens such as DNP, and digoxiginin, and combinations of any of the foregoing, as well as antibodies (monoclonal, polyclonal, and recombinant) to the foregoing, where relevant and antibody derivatives or fragments thereof.

[1690] 446. The composition according to item 441, wherein the one or more immuno active molecules are derived from viral or bacterial proteins or fragments thereof.

[1691] 447. The composition according to item 441, wherein the one or more immuno active molecules are attached to the multimerization domain(s) either directly, through one or more linkers or via one or more of the binding entities or one or more multimerization domains.

[1692] 448. The composition according to item 441, wherein the one or more immuno active molecules are linked to another immunoactive molecules and then attached to one or more multimerization domains.

[1693] 449. The composition according to any of items 3 to 303, wherein the MHC multimer is covalently or non-covalently associated with various molecules such as molecules with adjuvant effects, immune targets such as antigens, molecules with biological activity such as enzymes, regulators of receptor activity, receptor ligands, immune potentiators, drugs, toxins, co-receptors, proteins and peptides in general; sugar moieties; lipid groups; nucleic acids including siRNA; nano particles; small molecules.

[1694] 450. The composition according to any of items 3 to 303, wherein the MHC multimer is covalently or non-covalently associated with one or more biologically active molecules and/or one or more immuno active molecules.

[1695] 451. The composition according to item 450, wherein the one or more biologically active molecules and/or one or more immuno active molecules are attachment by chemical reactions between reactive groups on the biologically active molecule or immuno active molecule and reactive groups of the multimerisation domain and/or between reactive groups on the biologically active molecule or immuno active molecule and reactive groups of the MHC-peptide complex.

[1696] 452. The composition according to item 450, wherein the one or more biologically active molecules and/or one or more immuno active molecules are attachment by non-covalent interaction between part of the multimerisation domain and part of the biological active molecule or immuno active molecule; or between part of the MHC-peptide complex and part of the biological active molecule or immuno active molecule.

[1697] 453. The composition according to item 450, wherein the one or more biologically active molecules and/or one or more immuno active molecules are attachment by covalent and non-covalent attachment of the biologically molecule or immuno active molecule to the multimerisation domain by a linker molecule.

[1698] 454. The composition according to item 450, wherein the one or more biologically active molecules and/or one or more immuno active molecules are attachment by repetitively attachment aiding to recognition by and stimulation of the innate immune system via Toll or other receptors.

[1699] 455. The composition according to any of items 3 to 454 comprising a plurality of identical or different multimerization domains linked by a multimerization domain linking moiety,

wherein at least one of said multimerization domains is associated with (a-b-P)ₙ, wherein n>1,
wherein a and b together form a functional MHC protein capable of binding the peptide P, when P is present
wherein (a-b-P) is the MHC-peptide complex formed when the peptide P binds to the functional MHC protein.

[1700] 456. The composition according to item 455, wherein the plurality of identical or different multimerization domains is in the range of from 2 to 100, such as 2 to 5, 5 to 10, 10 to 20, 20 to 30, 30 to 40, 40 to 50, 50 to 60, 60 to 70, 70 to 80, 80 to 90, 90 to 100.

[1701] 457. The composition according to item 455, wherein the MHC multimer comprises a first multimerization domain linked to a second multimerization domain.

[1702] 458. The composition according to item 457, wherein the first multimerization domain and the second multimerization domain is independently selected from the group consisting of multimerization domains cited in any of items 4 to 37.

[1703] 459. The composition according to item 457, wherein the association is a covalent linkage so that one or more of the n MHC-peptide complexes is covalently linked to the first multimerization domains.

[1704] 460. The composition according to item 457, wherein the association is a non-covalent association so that one or more of the n MHC-peptide complexes is non-covalently associated with the first multimerization domain.

[1705] 461. The composition according to item 457, wherein the first multimerization domain comprises one or more scaffolds.

[1706] 462. The composition according to item 457, wherein the first multimerization domain comprises one or more carriers.

[1707] 463. The composition according to item 457, wherein the first multimerization domain comprises at least one scaffold and at least one carrier.

[1708] 464. The composition according to item 457, wherein the first multimerization domain comprises one or more optionally substituted organic molecules.

[1709] 465. The composition according to item 464, wherein the optionally substituted organic molecule comprises one or more functionalized cyclic structures.

[1710] 466. The composition according to item 465, wherein the one or more functionalized cyclic structures comprises one or more benzene rings.

[1711] 467. The composition according to item 464, wherein the optionally substituted organic molecule comprises a scaffold molecule comprising at least three reactive groups, or at least three sites suitable for non-covalent attachment.

[1712] 468. The composition according to item 457, wherein the first multimerization domain comprises one or more biological cells, such as antigen presenting cells or dendritic cells.

[1713] 469. The composition according to item 457, wherein the first multimerization domain comprises one or more membranes.

[1714] 470. The composition according to item 469, wherein the one or more membranes comprises liposomes or micelles.

[1715] 471. The composition according to item 457, wherein the first multimerization domain comprises one or more polymers.

[1716] 472. The composition according to item 471, wherein the one or more polymers are selected from the group consisting of the group consisting of polysaccharides.

[1717] 473. The composition according to item 472, wherein the polysaccharide comprises one or more dextran moieties.

[1718] 474. The composition according to item 457, wherein the first multimerization domain comprises one or more entities selected from the group consisting of an IgG domain, a coiled-coil polypeptide structure, a DNA duplex, a nucleic acid duplex, PNA-PNA, PNA-DNA, DNA-RNA.

[1719] 475. The composition according to item 457, wherein the first multimerization domain comprises an avidin, such as streptavidin.

[1720] 476. The composition according to item 457, wherein the first multimerization domain comprises an antibody.

[1721] 477. The composition according to item 476, wherein the antibody is selected from the group consisting of polyclonal antibody, monoclonal antibody, IgA, IgG, IgM, IgD, IgE, IgG1, IgG2, IgG3, IgG4, IgA1, IgA2, IgM1, IgM2, humanized antibody, humanized monoclonal antibody, chimeric antibody, mouse antibody, rat antibody, rabbit antibody, human antibody, camel antibody, sheep antibody, engineered human antibody, epitope-focused antibody, agonist antibody, antagonist antibody, neutralizing antibody, naturally-occurring antibody, isolated antibody, monovalent antibody, bispecific antibody, trispecific antibody, multispecific antibody, heteroconjugate antibody, immunoconjugates, immunoliposomes, labeled antibody, antibody fragment, domain antibody, nanobody, minibody, maxibody, diabody, fusion antibody.

[1722] 478. The composition according to item 457, wherein the first multimerization domain comprises one or more small organic scaffold molecules.

[1723] 479. The composition according to item 457, wherein the first multimerization comprises one or more further polypeptides in addition to a and b.

[1724] 480. The composition according to item 457, wherein the first multimerization comprises one or more protein complexes.

[1725] 481. The composition according to item 457, wherein the first multimerization comprises one or more beads

[1726] 482. The composition according to item 457, wherein the first multimerization domain comprises one or more compounds selected from the group consisting of agarose, sepharose, resin beads, glass beads, pore-glass beads, glass particles coated with a hydrophobic polymer, chitosan-coated beads, SH beads, latex beads, spherical latex beads, allele-type beads, SPA bead, PEG-based resins, PEG-coated bead, PEG-encapsulated bead, polystyrene beads, magnetic polystyrene beads, glutathione agarose beads, magnetic bead, paramagnetic beads, protein A and/or protein G sepharose beads, activated carboxylic acid bead, macroscopic beads, microscopic beads, insoluble resin beads, silica-based resins, cellulosic resins, cross-linked agarose beads, polystyrene beads, cross-linked polyacrylamide resins, beads with iron cores, metal beads, dynabeads, Polymethylmethacrylate beads activated with NHS, streptavidin-agarose beads, polypropylene, polyethylene, dextran, nylon, amylases, natural and modified celluloses, nitrocellulose, polyacrylamides, gabbros, magnetite, polymers, oligomers, non-repeating moieties, polyethylene glycol (PEG), monomethoxy-PEG, mono-(C₁-C₁₀)alkoxy-PEG, aryloxy-PEG, poly-(N-vinyl pyrrolidone)PEG, tresyl monomethoxy PEG, PEG propionaldehyde, bis-succinimidyl carbonate PEG, polystyrene bead crosslinked with divinylbenzene, propylene glycol homopolymers, a polypropylene oxide/ethylene oxide co-polymer, polyoxyethylated polyols (e.g., glycerol), polyvinyl alcohol, dextran, aminodextran, carbohydrate-based polymers, cross-linked dextran beads, polysaccharide beads, polycarbamate beads, divinyl sulfone activated polysaccharide, polystyrene beads that have been functionalized with tosyl-activated esters, magnetic polystyrene beads functionalized with tosyl-activated esters, streptavidin beads, streptavidin-monomer coated beads, streptavidin-tetramer coated beads, Streptavidin Coated Compel Magnetic beads, avidin coated beads, dextramer coated beads, divinyl sulfone-activated dextran, Carboxylate-modified bead, amine-modified beads, antibody coated beads, cellulose beads, grafted co-poly beads, poly-acrylamide beads, dimethylacrylamide beads optionally crosslinked with N—N′-bis-acryloylethylenediamine, hollow fiber membranes, fluorescent beads, collagen-agarose beads, gelatin beads, collagen-gelatin beads, collagen-fibronectin-gelatin beads, collagen beads, chitosan beads, collagen-chitosan beads, protein-based beads, hydrogel beads, hemicellulose, alkyl cellulose, hydroxyalkyl cellulose, carboxymethylcellulose, sulfoethylcellulose, starch, xylan, amylopectine, chondroitin, hyarulonate, heparin, guar, xanthan, mannan, galactomannan, chitin and chitosan.

[1727] 483. The composition according to item 457, wherein the first multimerization domain comprises a dimerization domain.

[1728] 484. The composition according to item 457, wherein the first multimerization domain comprises a trimerization domain.

[1729] 485. The composition according to item 457, wherein the first multimerization domain comprises a tetramerization domain.

[1730] 486. The composition according to item 457, wherein the first multimerization domain comprises a pentamerization domain.

[1731] 487. The composition according to item 486, wherein the pentamerization domain comprises a coiled-coil polypeptide structure.

[1732] 488. The composition according to item 457, wherein the first multimerization domain comprises a hexamerization domain.

[1733] 489. The composition according to item 488, wherein the hexamerization domain comprises three IgG domains.

[1734] 490. The composition according to item 457, wherein the first multimerization domain comprises a polymer structure to which is attached one or more scaffolds.

[1735] 491. The composition according to item 490, wherein the polymer structure comprises a polysaccharide.

[1736] 492. The composition according to item 491, wherein the polysaccharide comprises one or more dextran moieties.

[1737] 493. The composition according to item 457, wherein the first multimerization domain comprises a polyamide and/or a polyethylene glycol and/or a polysaccharide and/or a sepharose.

[1738] 494. The composition according to item 457, wherein the first multimerization domain comprises a carboxy methyl dextran and/or a dextran polyaldehyde and/or a carboxymethyl dextran lactone and/or or a cyclodextrin.

[1739] 495. The composition according to item 457, wherein one or more labels is covalently attached to the first multimerization domain.

[1740] 496. The composition according to item 457, wherein one or more labels is non-covalently attached to the first multimerization domain.

[1741] 497. The composition according to item 496, wherein the one or more labels is non-covalently attached to an antibody in the first multimerization domain.

[1742] 498. The MHC multimer according item 495, wherein the one or more labels is covalently attached to an antibody in the first multimerization domain.

[1743] 499. The MHC multimer according item 496, wherein the one or more labels is non-covalently attached to an aptamer in the first multimerization domain.

[1744] 500. The MHC multimer according item 495, wherein the one or more labels is covalently attached to an aptamer in the first multimerization domain.

[1745] 501. The MHC multimer according item 496, wherein the one or more labels is non-covalently attached to a molecule in the first multimerization domain.

[1746] 502. The MHC multimer according item 495, wherein the one or more labels is covalently attached to a molecule in the first multimerization domain.

[1747] 503. The MHC multimer according item 496, wherein the one or more labels is non-covalently attached to a protein in the first multimerization domain.

[1748] 504. The MHC multimer according item 495, wherein the one or more labels is covalently attached to a protein in the first multimerization domain.

[1749] 505. The MHC multimer according item 496, wherein the one or more labels is non-covalently attached to a sugar residue in the first multimerization domain.

[1750] 506. The MHC multimer according item 495, wherein the one or more labels is covalently attached to a sugar residue in the first multimerization domain.

[1751] 507. The MHC multimer according item 496, wherein the one or more labels is non-covalently attached to a DNA in the first multimerization domain.

[1752] 508. The MHC multimer according item 495, wherein the one or more labels is covalently attached to a DNA in the first multimerization domain.

[1753] 509. The MHC multimer according to any of the items 495 to 508, wherein the attachment is directly between reactive groups in the labelling molecule and reactive groups in the marker molecule.

[1754] 510. The MHC multimer according to any of the items 495 to 508, wherein the attachment is through a linker connecting labelling molecule and marker.

[1755] 511. The MHC multimer according to any of the items 495 to 510, wherein one label is used.

[1756] 512. The MHC multimer according to any of the items 495 to 510, wherein more than one label is used.

[1757] 513. The composition according to item 512, wherein the more than one label are all identical.

[1758] 514. The composition according to item 512, wherein at least two labels are different.

[1759] 515. The composition according to any of items 495 to 514, wherein the one or more labels is a fluorophore.

[1760] 516. The composition according to item 515, wherein the one or more fluorophore label are selected from the group consisting of selected from the group fluorescein isothiocyanate, rhodamine, phycoerythrin, phycocyanin, allophycocyanin, o-phthaldehyde and fluorescamine.

[1761] 517. The composition according to item 515, wherein the one or more fluorophore label are selected from the group consisting of 2-(4′-maleimidylanilino)naphthalene-6-sulfonic acid, sodium salt

[1762] 518. The composition according to item 515, wherein the one or more fluorophore label are selected from the group consisting of 5-((((2-iodoacetyl)amino)ethyl)amino)naphthalene-1-sulfonic acid

[1763] 519. The composition according to item 515, wherein the one or more fluorophore label are selected from the group consisting of Pyrene-1-butanoic acid

[1764] 520. The composition according to item 515, wherein the one or more fluorophore label are selected from the group consisting of AlexaFluor 350 (7-amino-6-sulfonic acid-4-methyl coumarin-3-acetic acid

[1765] 521. The composition according to item 515, wherein the one or more fluorophore label are selected from the group consisting of AMCA (7-amino-4-methyl coumarin-3-acetic acid

[1766] 522. The composition according to item 515, wherein the one or more fluorophore label are selected from the group consisting of 7-hydroxy-4-methyl coumarin-3-acetic acid

[1767] 523. The composition according to item 515, wherein the one or more fluorophore label are selected from the group consisting of Marina Blue (6,8-difluoro-7-hydroxy-4-methyl coumarin-3-acetic acid

[1768] 524. The composition according to item 515, wherein the one or more fluorophore label are selected from the group consisting of 7-dimethylamino-coumarin-4-acetic acid

[1769] 525. The composition according to item 515, wherein the one or more fluorophore label are selected from the group consisting of Fluorescamin-N-butyl amine adduct

[1770] 526. The composition according to item 515, wherein the one or more fluorophore label are selected from the group consisting of 7-hydroxy-coumarine-3-carboxylic acid

[1771] 527. The composition according to item 515, wherein the one or more fluorophore label are selected from the group consisting of CascadeBlue (pyrene-trisulphonic acid acetyl azide

[1772] 528. The composition according to item 515, wherein the one or more fluorophore label are selected from the group consisting of Cascade Yellow

[1773] 529. The composition according to item 515, wherein the one or more fluorophore label are selected from the group consisting of Pacific Blue (6,8 difluoro-7-hydroxy coumarin-3-carboxylic acid

[1774] 530. The composition according to item 515, wherein the one or more fluorophore label are selected from the group consisting of 7-diethylamino-coumarin-3-carboxylic acid

[1775] 531. The composition according to item 515, wherein the one or more fluorophore label are selected from the group consisting of N-(((4-azidobenzoyl)amino)ethyl)-4-amino-3,6-disulfo-1,8-naphthalimide, dipotassium salt

[1776] 532. The composition according to item 515, wherein the one or more fluorophore label are selected from the group consisting of Alexa Fluor 430

[1777] 533. The composition according to item 515, wherein the one or more fluorophore label are selected from the group consisting of 3-perylenedodecanoic acid

[1778] 534. The composition according to item 515, wherein the one or more fluorophore label are selected from the group consisting of 8-hydroxypyrene-1,3,6-trisulfonic acid, trisodium salt

[1779] 535. The composition according to item 515, wherein the one or more fluorophore label are selected from the group consisting of 12-(N-(7-nitrobenz-2-oxa-1,3-diazol-4-yl)amino)dodecanoic acid

[1780] 536. The composition according to item 515, wherein the one or more fluorophore label are selected from the group consisting of N,N-dimethyl-N-(iodoacetyl)-N-(7-nitrobenz-2-oxa-1,3-diazol-4-yl)ethylenediamine

[1781] 537. The composition according to item 515, wherein the one or more fluorophore label are selected from the group consisting of Oregon Green 488 (difluoro carboxy fluorescein)

[1782] 538. The composition according to item 515, wherein the one or more fluorophore label are selected from the group consisting of 5-iodoacetamidofluorescein

[1783] 539. The composition according to item 515, wherein the one or more fluorophore label are selected from the group consisting of propidium iodide-DNA adduct

[1784] 540. The composition according to item 515, wherein the one or more fluorophore label are selected from the group consisting of Carboxy fluorescein

[1785] 541. The composition according to any of items 495 to 514, wherein the one or more labels is a fluorescent label.

[1786] 542. The composition according to item 541, wherein the one or more fluorescent label is a simple fluorescent label

[1787] 543. The composition according to item 541, wherein the one or more simple fluorescent label is selected from the group Fluor dyes, Pacific Blue™, Pacific Orange™, Cascade Yellow™

[1788] 544. The composition according to item 541, wherein the one or more simple fluorescent label is selected from the group AlexaFluor® (AF), AF405, AF488, AF500, AF514, AF532, AF546, AF555, AF568, AF594, AF610, AF633, AF635, AF647, AF680, AF700, AF710, AF750, AF800.

[1789] 545. The composition according to item 541, wherein the one or more simple fluorescent label is selected from the group Quantum Dot based dyes, QDot® Nanocrystals (Invitrogen, MolecularProbs), Qdot®525, Qdot®565, Qdot®585, Qdot®605, Qdot®655, Qdot®705, Qdot®800.

[1790] 546. The composition according to item 541, wherein the one or more simple fluorescent label is selected from the group DyLight™ Dyes (Pierce) (DL); DL549, DL649, DL680, DL800.

[1791] 547. The composition according to item 541, wherein the one or more simple fluorescent label is selected from the group Fluorescein (Flu) or any derivate of that, such as FITC

[1792] 548. The composition according to item 541, wherein the one or more simple fluorescent label is selected from the group Cy-Dyes, Cy2, Cy3, Cy3.5, Cy5, Cy5.5, Cy7.

[1793] 549. The composition according to item 541, wherein the one or more simple fluorescent label is selected from the group Fluorescent Proteins, RPE, PerCp, APC, Green fluorescent proteins; GFP and GFP derivated mutant proteins; BFP, CFP, YFP, DsRed, T1, Dimer2, mRFP1, MBanana, mOrange, dTomato, tdTomato, mTangerine, mStrawberry, mCherry.

[1794] 550. The composition according to item 541, wherein the one or more simple fluorescent label is selected from the group Tandem dyes, RPE-Cy5, RPE-Cy5.5, RPE-Cy7, RPE-AlexaFluor® tandem conjugates; RPE-Alexa610, RPE-TxRed, APC-Aleca600, APC-Alexa610, APC-Alexa750, APC-Cy5, APC-Cy5.5.

[1795] 551. The composition according to item 541, wherein the one or more simple fluorescent label is selected from the group multi fluorochrome assemblies, Multiple fluorochromes attached to a polymer molecule, such as a peptide/protein, Dextrane, polysaccharide, any combination of the fluorescent dyes involving in generation of FRET (Fluorescence resonance energy transfer) based techniques.

[1796] 552. The composition according to item 541, wherein the one or more simple fluorescent label is selected from the group ionophors; ion chelating fluorescent props, props that change wavelength when binding a specific ion, such as Calcium, props that change intensity when binding to a specific ion, such as Calcium.

[1797] 553. The composition according to any of items 495 to 514, wherein the one or more labels is capable of absorption of light

[1798] 554. The composition according to item 553, wherein the one or more labels capable of absorption of light is a chromophore.

[1799] 555. The composition according to item 553, wherein the one or more labels capable of absorption of light is a dye.

[1800] 556. The composition according to any of items 495 to 514, wherein the one or more labels is capable of emission of light after excitation

[1801] 557. The composition according to item 556, wherein the one or more labels capable of emission of light is one or more fluorochromes.

[1802] 558. The composition according to item 557, wherein the one or more fluorochrome is selected from the AlexaFluor® (AF) family, which include AF®350, AF405, AF430, AF488, AF500, AF514, AF532, AF546, AF555, AF568, AF594, AF610, AF633, AF635, AF647, AF680, AF700, AF710, AF750 and AF800

[1803] 559. The composition according to item 557, wherein the one or more fluorochrome is selected from the Quantum Dot (Qdot®) based dye family, which include Qdot®525, Qdot®565, Qdot®585, Qdot®605, Qdot®655, Qdot®705, Qdot®800

[1804] 560. The composition according to item 557, wherein the one or more fluorochrome is selected from the DyLight™ Dyes (DL) family, which include DL549, DL649, DL680, DL800

[1805] 561. The composition according to item 557, wherein the one or more fluorochrome is selected from the family of Small fluorescing dyes, which include FITC, Pacific Blue™, Pacific Orange™, Cascade Yellow™, Marina Blue™, DSred, DSred-2, 7-AAD, TO-Pro-3.

[1806] 562. The composition according to item 557, wherein the one or more fluorochrome is selected from the family of Cy-Dyes, which include Cy2, Cy3, Cy3.5, Cy5, Cy5.5, Cy7

[1807] 563. The composition according to item 557, wherein the one or more fluorochrome is selected from the family of Phycobili Proteins, which include R-Phycoerythrin (RPE), PerCP, Allophycocyanin (APC), B-Phycoerythrin, C-Phycocyanin.

[1808] 564. The composition according to item 557, wherein the one or more fluorochrome is selected from the family of Fluorescent Proteins, which include (E)GFP and GFP ((enhanced) green fluorescent protein) derived mutant proteins; BFP, CFP, YFP, DsRed, T1, Dimer2, mRFP1, MBanana, mOrange, dTomato, tdTomato, mTangerine.

[1809] 565. The composition according to item 557, wherein the one or more fluorochrome is selected from the family of Tandem dyes with RPE, which include RPE-Cy5, RPE-Cy5.5, RPE-Cy7, RPE-AlexaFluor® tandem conjugates; RPE-Alexa610, RPE-TxRed.

[1810] 566. The composition according to item 557, wherein the one or more fluorochrome is selected from the family of Tandem dyes with APC, which include APC-Aleca600, APC-Alexa610, APC-Alexa750, APC-Cy5, APC-Cy5.5.

[1811] 567. The composition according to item 557, wherein the one or more fluorochrome is selected from the family of Calcium dyes, which include Indo-1-Ca²⁺ Indo-2-Ca²⁺.

[1812] 568. The composition according to any of items 495 to 514, wherein the one or more labels is capable of reflection of light

[1813] 569. The composition according to item 568, wherein the one or more labels capable of reflection of light comprises gold

[1814] 570. The composition according to item 568, wherein the one or more labels capable of reflection of light comprises plastic

[1815] 571. The composition according to item 568, wherein the one or more labels capable of reflection of light comprises glass

[1816] 572. The composition according to item 568, wherein the one or more labels capable of reflection of light comprises polystyrene

[1817] 573. The composition according to item 568, wherein the one or more labels capable of reflection of light comprises pollen

[1818] 574. The composition according to any of items 495 to 514, wherein the one or more labels is a chemiluminescent label.

[1819] 575. The composition according to item 574, wherein the chemiluminescent labels is selected from the group luminol, isoluminol, theromatic acridinium ester, imidazole, acridinium salt and oxalate ester.

[1820] 576. The composition according to any of items 495 to 514, wherein the one or more labels is a bioluminescent label.

[1821] 577. The composition according to item 576, wherein the bioluminescent labels is selected from the group luciferin, luciferase and acquorin.

[1822] 578. The composition according to any of items 495 to 514, wherein the one or more labels is a radioactive label.

[1823] 579. The composition according to item 578, wherein the one or more radioactive labels is a radionuclide.

[1824] 580. The composition according to item 578, wherein the one or more radioactive labels is an isotope.

[1825] 581. The composition according to item 578, wherein the one or more radioactive labels comprises α rays.

[1826] 582. The composition according to item 578, wherein the one or more radioactive labels comprises β rays.

[1827] 583. The composition according to item 578, wherein the one or more radioactive labels comprises γ rays.

[1828] 584. The composition according to any of items 495 to 514, wherein the one or more labels is detectable by NMR (nuclear magnetic resonance form paramagnetic molecules)

[1829] 585. The composition according to any of items 495 to 514, wherein the one or more labels is an enzyme label.

[1830] 586. The composition according to item 585, wherein the enzyme catalyze a reaction between chemicals in the near environment of the labeling molecules, producing a light signal (chemi-luminescence)

[1831] 587. The composition according to item 585, wherein the enzyme catalyze a reaction between chemicals in the near environment of the labeling molecules, resulting in precipitation of chromophor dyes

[1832] 588. The composition according to item 585, wherein the enzyme catalyze a reaction between chemicals in the near environment of the labeling molecules, resulting in precipitates that can be detected by an additional layer of detection molecules

[1833] 589. The composition according to item 585, wherein the enzyme label is selected from the group peroxidases, malate dehydrogenase, staphylococcal nuclease, delta-5-steroid isomerase, yeast alcohol dehydrogenase, alpha-glycerophosphate, dehydrogenase, triose phosphate isomerase, horseradish peroxidase, alkaline phosphatase, asparaginase, glucose oxidase, beta-galactosidase, ribonuclease, urease, catalase, glucose-6-phosphate dehydrogenase, glucoamylase and acetylcholinesterase.

[1834] 590. The composition according to item 585, wherein the enzyme label is horseradish peroxidase

[1835] 591. The composition according to item 585, wherein the enzyme label is horseradish peroxidase and the substrate is diaminobenzidine (DAB)

[1836] 592. The composition according to item 585, wherein the enzyme label is horseradish peroxidase and the substrate is 3-amino-9-ethyl-carbazole (AEC+)

[1837] 593. The composition according to item 585, wherein the enzyme label is horseradish peroxidase and the substrate is biotinyl tyramide

[1838] 594. The composition according to item 585, wherein the enzyme label is horseradish peroxidase and the substrate is fluorescein tyramide

[1839] 595. The composition according to item 585, wherein the enzyme label is alkaline phosphatase

[1840] 596. The composition according to item 585, wherein the enzyme label is alkaline phosphatase and the substrate is Fast red dye

[1841] 597. The composition according to any of items 495 to 514, wherein the one or more labels is a ionophore or chelating chemical compound binding to specific ions such as Ca²⁺

[1842] 598. The composition according to any of items 495 to 514, wherein the one or more labels is a lanthanide

[1843] 599. The composition according to item 598, wherein the lanthanide comprises fluorescence

[1844] 600. The composition according to item 598, wherein the lanthanide comprises Phosphorescence

[1845] 601. The composition according to item 598, wherein the lanthanide is paramagnetic

[1846] 602. The composition according to any of items 495 to 514, wherein the one or more labels is a DNA fluorescing stain

[1847] 603. The composition according to item 602, wherein the DNA fluorescing stain is Propidium iodide

[1848] 604. The composition according to item 602, wherein the DNA fluorescing stain is Hoechst stain

[1849] 605. The composition according to item 602, wherein the DNA fluorescing stain is DAPI

[1850] 606. The composition according to item 602, wherein the DNA fluorescing stain is AMC

[1851] 607. The composition according to item 602, wherein the DNA fluorescing stain is DraQ5™

[1852] 608. The composition according to item 602, wherein the DNA fluorescing stain is Acridine orange

[1853] 609. The composition according to item 457, wherein the MHC-peptide complex (a-b-P) is attached to the first multimerization domain comprising an avidin or streptavidin via a linkage comprising a biotin moiety.

[1854] 610. The composition according to any of items 457 to 609, wherein the MHC-peptide complex is linked to the first multimerization domain by a first linker moiety.

[1855] 611. The composition according to item 610, wherein the MHC-peptide complex is linked to the first multimerization domain by a covalent linker moiety.

[1856] 612. The MHC multimer according to items 610 and 611, wherein the association of the first multimerization domain and at least one MHC-peptide complexes is formed by a binding entity X attached to, or being part of, the first multimerization domain, and a binding entity Y attached to, or being part of at least one of the MHC-peptide complexes.

[1857] 613. The MHC multimer according to items 610 and 611, wherein the linker moiety linking the first multimerization domain and the MHC-peptide complex comprises the linker moiety XY, wherein the linker moiety XY results from a reaction of the moiety X comprising one or more reactive groups and the moiety Y comprising one or more reactive groups, wherein at least some of said reactive groups are capable of reacting with each other.

[1858] 614. The composition according to item 613, wherein the moiety X comprises a nucleophilic group.

[1859] 615. The composition according to item 614, wherein the nucleophilic group is selected from the group consisting of —NH₂, —OH, —SH, —NH—NH₂.

[1860] 616. The composition according to item 613, wherein the moiety Y comprises an electrophilic group.

[1861] 617. The composition according to item 616, wherein the electrophilic group is selected from the group consisting of CHO, COOH and CO.

[1862] 618. The MHC multimer according to items 610 and 611, wherein at least one of the reactive groups on one of the moieties X and Y comprises a radical capable of reacting with a reactive group forming part of the other moiety.

[1863] 619. The MHC multimer according to items 610 and 611, wherein X and Y comprises reactive groups natively associated with the first multimerization domain and/or the MHC-peptide complexes.

[1864] 620. The MHC multimer according to items 610 and 611, wherein X and Y comprises reactive groups not natively associated with the first multimerization domain and/or the MHC-peptide complex.

[1865] 621. The MHC multimer according to items 610 and 611, wherein the linker moiety forms a covalent link between the first multimerization domain and at least one of the MHC-peptide complexes.

[1866] 622. The MHC multimer according to items 610 and 611, wherein the reactive groups of MHC-peptide complexes include amino acid side chains selected from the group consisting of —NH₂, —OH, —SH, and —NH—

[1867] 623. The MHC multimer according to items 610 and 611, wherein the reactive groups of the first multimerization domain include hydroxyls of polysaccharides such as dextrans

[1868] 624. The MHC multimer according to items 610 and 611, wherein the reactive groups of the first multimerization domain selected from the group consisting of amino acid side chains comprising —NH₂, —OH, —SH, and —NH— of polypeptides

[1869] 625. The MHC multimer according to items 610 and 611, wherein one of the polypeptides of the MHC-peptide complex is linked by a protein fusion to the first multimerization domain

[1870] 626. The MHC multimer according to items 610 and 611, wherein one of the polypeptides of the MHC-peptide complex is linked by a protein fusion to the first multimerization domain, wherein an acyl group and an amino group react to form an amide bond

[1871] 627. The composition according to item 457, wherein one of the polypeptides of the MHC-peptide complex is linked by non-native reactive groups to the first multimerization domain.

[1872] 628. The composition according to item 457, wherein the reactive groups include reactive groups that are attached to the first multimerization domain through association of a linker molecule comprising the reactive group.

[1873] 629. The composition according to item 457, wherein the reactive groups include reactive groups that are attached to the MHC-peptide complex through association of a linker molecule comprising the reactive group.

[1874] 630. The composition according to item 473, wherein dextran is activated by reaction of the dextran hydroxyls with divinyl sulfon

[1875] 631. The composition according to item 630, wherein dextran is activated by a multistep reaction that results in the decoration of the dextran with maleimide groups.

[1876] 632. The composition according to item 457, wherein the first multimerization domain comprises one or more nucleophilic groups

[1877] 633. The composition according to item 632, wherein the nucleophilic group is selected from the group consisting of —NH₂, —OH, —SH, —CN, —NH—NH₂

[1878] 634. The composition according to item 457, wherein the first multimerization domain is selected from the group consisting of polysaccharides, polypeptides comprising e.g. lysine, serine, and cysteine.

[1879] 635. The composition according to item 457, wherein the first multimerization domain comprises one or more electrophilic groups.

[1880] 636. The composition according to item 635, wherein the electrophilic group is selected from the group consisting of —COOH, —CHO, —CO, NHS-ester, tosyl-activated ester, and other activated esters, acid-anhydrides.

[1881] 637. The composition according to item 457, wherein the first multimerization domain is selected from the group consisting of polypeptides comprising e.g. glutamate and aspartate, or vinyl sulfone activated dextran.

[1882] 638. The composition according to item 457, wherein the first multimerization domain comprises one or more radicals.

[1883] 639. The composition according to item 457, wherein the first multimerization domain comprises one or more conjugated double bonds.

[1884] 640. The composition according to item 457, wherein the first multimerization domain comprises one or more beads and one or more linker moieties.

[1885] 641. The MHC multimer according to any of the items 610 to 640, wherein the linker is a flexible linker.

[1886] 642. The MHC multimer according to any of the items 610 to 640, wherein the linker is a rigid linker.

[1887] 643. The MHC multimer according to any of the items 610 to 640, wherein the linker is a water-soluble linker.

[1888] 644. The MHC multimer according to any of the items 610 to 640, wherein the linker is a cleavable linker.

[1889] 645. The composition according to item 644, wherein the cleavable linker is selected from linkers depicted in (FIG. 2) in PCT/DK2008/050167.

[1890] 646. The composition according to item 644, wherein the cleavable linker is cleavable at physiological conditions

[1891] 647. The MHC multimer according to items 610 or 611, wherein the MHC-peptide complex is linked to the first multimerization domain by a non-covalent linker moiety.

[1892] 648. The composition according to item 647, wherein the non-covalent linkage comprises natural dimerization

[1893] 649. The composition according to item 648, wherein the natural dimerization comprises antigen-antibody pairs

[1894] 650. The composition according to item 648, wherein the natural dimerization comprises DNA-DNA interactions

[1895] 651. The composition according to item 647, wherein the non-covalent linkage comprises natural interactions

[1896] 652. The composition according to item 651, wherein the natural interaction comprises biotin and streptavidin

[1897] 653. The composition according to item 481, wherein the bead is coated with streptavidin monomers, which in turn are associated with biotinylated MHC complexes

[1898] 654. The composition according to item 481, wherein the bead is coated with streptavidin tetramers, each of which being independently associated with 0, 1, 2, 3, or 4 biotinylated MHC complexes

[1899] 655. The composition according to item 481, wherein the bead is coated with a polysaccharide, such as a polysaccharide comprising dextran moieties.

[1900] 656. The composition according to item 651, wherein the natural interaction comprises the interaction of MHC complexes (comprising full-length polypeptide chains, including the transmembrane portion) with the cell membrane of for example dendritic cells

[1901] 657. The composition according to item 651, wherein the non-covalent linkage comprises artificial interactions

[1902] 658. The composition according to item 657, wherein the artificial interaction comprises His₆ tag interacting with Ni-NTA

[1903] 659. The composition according to item 657, wherein the artificial interaction comprises PNA-PNA

[1904] 660. The composition according to item 651, wherein the non-covalent linkage comprises non-specific adsorption

[1905] 661. The composition according to item 660, wherein the non-specific adsorption comprises adsorption of proteins onto surfaces

[1906] 662. The composition according to item 651, wherein the non-covalent linkage comprises the pentamer structure

[1907] 663. The composition according to item 651, wherein the non-covalent linkage comprises interactions selected from the group streptavidin/biotin, avidin/biotin, antibody/antigen, DNA/DNA, DNA/PNA, DNA/RNA, PNA/PNA, LNA/DNA, leucine zipper e.g. Fos/Jun, IgG dimeric protein, IgM multivalent protein, acid/base coiled-coil helices, chelate/metal ion-bound chelate, streptavidin (SA) and avidin and derivatives thereof, biotin, immunoglobulins, antibodies (monoclonal, polyclonal, and recombinant), antibody fragments and derivatives thereof, leucine zipper domain of AP-1 (jun and fos), hexa-his (metal chelate moiety), hexa-hat GST (glutathione S-transferase) glutathione affinity, Calmodulin-binding peptide (CBP), Strep-tag, Cellulose Binding Domain, Maltose Binding Protein, S-Peptide Tag, Chitin Binding Tag, Immuno-reactive Epitopes, Epitope Tags, E2Tag, HA Epitope Tag, Myc Epitope, FLAG Epitope, AU1 and AU5 Epitopes, Glu-Glu Epitope, KT3 Epitope, IRS Epitope, Btag Epitope, Protein Kinase-C Epitope, VSV Epitope, lectins that mediate binding to a diversity of compounds, including carbohydrates, lipids and proteins, e.g. Con A (Canavalia ensiformis) or WGA (wheat germ agglutinin) and tetranectin or Protein A or G (antibody affinity).

[1908] 664. The composition according to item 457, wherein the association is a covalent linkage so that one or more of the n MHC-peptide complexes is covalently linked to the second multimerization domains.

[1909] 665. The composition according to item 457, wherein the association is a non-covalent association so that one or more of the n MHC-peptide complexes is non-covalently associated with the second multimerization domain.

[1910] 666. The composition according to item 457, wherein the second multimerization domain comprises one or more scaffolds.

[1911] 667. The composition according to item 457, wherein the second multimerization domain comprises one or more carriers.

[1912] 668. The composition according to item 457, wherein the second multimerization domain comprises at least one scaffold and at least one carrier.

[1913] 669. The composition according to item 457, wherein the second multimerization domain comprises one or more optionally substituted organic molecules.

[1914] 670. The composition according to item 669, wherein the optionally substituted organic molecule comprises one or more functionalized cyclic structures.

[1915] 671. The composition according to item 670, wherein the one or more functionalized cyclic structures comprises one or more benzene rings.

[1916] 672. The composition according to item 669, wherein the optionally substituted organic molecule comprises a scaffold molecule comprising at least three reactive groups, or at least three sites suitable for non-covalent attachment.

[1917] 673. The composition according to item 457, wherein the second multimerization domain comprises one or more biological cells, such as antigen presenting cells or dendritic cells.

[1918] 674. The composition according to item 457, wherein the second multimerization domain comprises one or more membranes.

[1919] 675. The composition according to item 674, wherein the one or more membranes comprises liposomes or micelles.

[1920] 676. The composition according to item 457, wherein the second multimerization domain comprises one or more polymers.

[1921] 677. The composition according to item 676, wherein the one or more polymers are selected from the group consisting of the group consisting of polysaccharides.

[1922] 678. The composition according to item 677, wherein the polysaccharide comprises one or more dextran moieties.

[1923] 679. The composition according to item 457, wherein the second multimerization domain comprises one or more entities selected from the group consisting of an IgG domain, a coiled-coil polypeptide structure, a DNA duplex, a nucleic acid duplex, PNA-PNA, PNA-DNA, DNA-RNA.

[1924] 680. The composition according to item 457, wherein the second multimerization domain comprises an avidin, such as streptavidin.

[1925] 681. The composition according to item 457, wherein the second multimerization domain comprises an antibody.

[1926] 682. The composition according to item 681, wherein the antibody is selected from the group consisting of polyclonal antibody, monoclonal antibody, IgA, IgG, IgM, IgD, IgE, IgG1, IgG2, IgG3, IgG4, IgA1, IgA2, IgM1, IgM2, humanized antibody, humanized monoclonal antibody, chimeric antibody, mouse antibody, rat antibody, rabbit antibody, human antibody, camel antibody, sheep antibody, engineered human antibody, epitope-focused antibody, agonist antibody, antagonist antibody, neutralizing antibody, naturally-occurring antibody, isolated antibody, monovalent antibody, bispecific antibody, trispecific antibody, multispecific antibody, heteroconjugate antibody, immunoconjugates, immunoliposomes, labeled antibody, antibody fragment, domain antibody, nanobody, minibody, maxibody, diabody, fusion antibody.

[1927] 683. The composition according to item 457, wherein the second multimerization domain comprises one or more small organic scaffold molecules.

[1928] 684. The composition according to item 457, wherein the second multimerization comprises one or more further polypeptides in addition to a and b.

[1929] 685. The composition according to item 457, wherein the second multimerization comprises one or more protein complexes.

[1930] 686. The composition according to item 457, wherein the second multimerization comprises one or more beads

[1931] 687. The composition according to item 457, wherein the second multimerization domain comprises one or more compounds selected from the group consisting of agarose, sepharose, resin beads, glass beads, pore-glass beads, glass particles coated with a hydrophobic polymer, chitosan-coated beads, SH beads, latex beads, spherical latex beads, allele-type beads, SPA bead, PEG-based resins, PEG-coated bead, PEG-encapsulated bead, polystyrene beads, magnetic polystyrene beads, glutathione agarose beads, magnetic bead, paramagnetic beads, protein A and/or protein G sepharose beads, activated carboxylic acid bead, macroscopic beads, microscopic beads, insoluble resin beads, silica-based resins, cellulosic resins, cross-linked agarose beads, polystyrene beads, cross-linked polyacrylamide resins, beads with iron cores, metal beads, dynabeads, Polymethylmethacrylate beads activated with NHS, streptavidin-agarose beads, polypropylene, polyethylene, dextran, nylon, amylases, natural and modified celluloses, nitrocellulose, polyacrylamides, gabbros, magnetite, polymers, oligomers, non-repeating moieties, polyethylene glycol (PEG), monomethoxy-PEG, mono-(C₁-C₁₀)alkoxy-PEG, aryloxy-PEG, poly-(N-vinyl pyrrolidone)PEG, tresyl monomethoxy PEG, PEG propionaldehyde, bis-succinimidyl carbonate PEG, polystyrene bead crosslinked with divinylbenzene, propylene glycol homopolymers, a polypropylene oxide/ethylene oxide co-polymer, polyoxyethylated polyols (e.g., glycerol), polyvinyl alcohol, dextran, aminodextran, carbohydrate-based polymers, cross-linked dextran beads, polysaccharide beads, polycarbamate beads, divinyl sulfone activated polysaccharide, polystyrene beads that have been functionalized with tosyl-activated esters, magnetic polystyrene beads functionalized with tosyl-activated esters, streptavidin beads, streptavidin-monomer coated beads, streptavidin-tetramer coated beads, Streptavidin Coated Compel Magnetic beads, avidin coated beads, dextramer coated beads, divinyl sulfone-activated dextran, Carboxylate-modified bead, amine-modified beads, antibody coated beads, cellulose beads, grafted co-poly beads, poly-acrylamide beads, dimethylacrylamide beads optionally crosslinked with N—N′-bis-acryloylethylenediamine, hollow fiber membranes, fluorescent beads, collagen-agarose beads, gelatin beads, collagen-gelatin beads, collagen-fibronectin-gelatin beads, collagen beads, chitosan beads, collagen-chitosan beads, protein-based beads, hydrogel beads, hemicellulose, alkyl cellulose, hydroxyalkyl cellulose, carboxymethylcellulose, sulfoethylcellulose, starch, xylan, amylopectine, chondroitin, hyarulonate, heparin, guar, xanthan, mannan, galactomannan, chitin and chitosan.

[1932] 688. The composition according to item 457, wherein the second multimerization domain comprises a dimerization domain.

[1933] 689. The composition according to item 457, wherein the second multimerization domain comprises a trimerization domain.

[1934] 690. The composition according to item 457, wherein the second multimerization domain comprises a tetramerization domain.

[1935] 691. The composition according to item 457, wherein the second multimerization domain comprises a pentamerization domain.

[1936] 692. The composition according to item 691, wherein the pentamerization domain comprises a coiled-coil polypeptide structure.

[1937] 693. The composition according to item 457, wherein the second multimerization domain comprises a hexamerization domain.

[1938] 694. The composition according to item 610, wherein the hexamerization domain comprises three IgG domains.

[1939] 695. The composition according to item 457, wherein the second multimerization domain comprises a polymer structure to which is attached one or more scaffolds.

[1940] 696. The composition according to item 695, wherein the polymer structure comprises a polysaccharide.

[1941] 697. The composition according to item 696, wherein the polysaccharide comprises one or more dextran moieties.

[1942] 698. The composition according to item 457, wherein the second multimerization domain comprises a polyamide and/or a polyethylene glycol and/or a polysaccharide and/or a sepharose.

[1943] 699. The composition according to item 457, wherein the second multimerization domain comprises a carboxy methyl dextran and/or a dextran polyaldehyde and/or a carboxymethyl dextran lactone and/or a cyclodextrin.

[1944] 700. The composition according to item 457, wherein one or more labels is covalently attached to the second multimerization domain.

[1945] 701. The composition according to item 457, wherein one or more labels is non-covalently attached to the second multimerization domain.

[1946] 702. The composition according to item 701, wherein the one or more labels is non-covalently attached to an antibody in the second multimerization domain.

[1947] 703. The composition according to item 700, wherein the one or more labels is covalently attached to an antibody in the second multimerization domain.

[1948] 704. The composition according to item 701, wherein the one or more labels is non-covalently attached to an aptamer in the second multimerization domain.

[1949] 705. The composition according to item 700, wherein the one or more labels is covalently attached to an aptamer in the second multimerization domain.

[1950] 706. The composition according to item 701, wherein the one or more labels is non-covalently attached to a molecule in the second multimerization domain.

[1951] 707. The composition according to item 700, wherein the one or more labels is covalently attached to a molecule in the second multimerization domain.

[1952] 708. The composition according to item 701, wherein the one or more labels is non-covalently attached to a protein in the second multimerization domain.

[1953] 709. The composition according to item 700, wherein the one or more labels is covalently attached to a protein in the second multimerization domain.

[1954] 710. The composition according to item 701, wherein the one or more labels is non-covalently attached to a sugar residue in the second multimerization domain.

[1955] 711. The composition according to item 700, wherein the one or more labels is covalently attached to a sugar residue in the second multimerization domain.

[1956] 712. The composition according to item 701, wherein the one or more labels is non-covalently attached to a DNA in the second multimerization domain.

[1957] 713. The composition according to item 700, wherein the one or more labels is covalently attached to a DNA in the second multimerization domain.

[1958] 714. The MHC multimer according to any of the items 700 to 713, wherein the attachment is directly between reactive groups in the labelling molecule and reactive groups in the marker molecule.

[1959] 715. The MHC multimer according to any of the items 700 to 713, wherein the attachment is through a linker connecting labelling molecule and marker.

[1960] 716. The MHC multimer according to any of the items 700 to 713, wherein one label is used.

[1961] 717. The MHC multimer according to any of the items 700 to 713, wherein more than one label is used.

[1962] 718. The composition according to item 717, wherein the more than one label are all identical.

[1963] 719. The composition according to item 717, wherein at least two labels are different.

[1964] 720. The composition according to any of items 700 to 719, wherein the one or more labels is a fluorophore.

[1965] 721. The composition according to item 720, wherein the one or more fluorophore label are selected from the group consisting of selected from the group fluorescein isothiocyanate, rhodamine, phycoerythrin, phycocyanin, allophycocyanin, o-phthaldehyde and fluorescamine.

[1966] 722. The composition according to item 720, wherein the one or more fluorophore label are selected from the group consisting of 2-(4′-maleimidylanilino)naphthalene-6-sulfonic acid, sodium salt

[1967] 723. The composition according to item 720, wherein the one or more fluorophore label are selected from the group consisting of 5-((((2-iodoacetyl)amino)ethyl)amino)naphthalene-1-sulfonic acid

[1968] 724. The composition according to item 720, wherein the one or more fluorophore label are selected from the group consisting of Pyrene-1-butanoic acid

[1969] 725. The composition according to item 720, wherein the one or more fluorophore label are selected from the group consisting of AlexaFluor 350 (7-amino-6-sulfonic acid-4-methyl coumarin-3-acetic acid

[1970] 726. The composition according to item 720, wherein the one or more fluorophore label are selected from the group consisting of AMCA (7-amino-4-methyl coumarin-3-acetic acid

[1971] 727. The composition according to item 720, wherein the one or more fluorophore label are selected from the group consisting of 7-hydroxy-4-methyl coumarin-3-acetic acid

[1972] 728. The composition according to item 720, wherein the one or more fluorophore label are selected from the group consisting of Marina Blue (6,8-difluoro-7-hydroxy-4-methyl coumarin-3-acetic acid

[1973] 729. The composition according to item 720, wherein the one or more fluorophore label are selected from the group consisting of 7-dimethylamino-coumarin-4-acetic acid

[1974] 730. The composition according to item 720, wherein the one or more fluorophore label are selected from the group consisting of Fluorescamin-N-butyl amine adduct

[1975] 731. The composition according to item 720, wherein the one or more fluorophore label are selected from the group consisting of 7-hydroxy-coumarine-3-carboxylic acid

[1976] 732. The composition according to item 720, wherein the one or more fluorophore label are selected from the group consisting of CascadeBlue (pyrene-trisulphonic acid acetyl azide

[1977] 733. The composition according to item 720, wherein the one or more fluorophore label are selected from the group consisting of Cascade Yellow

[1978] 734. The composition according to item 720, wherein the one or more fluorophore label are selected from the group consisting of Pacific Blue (6,8 difluoro-7-hydroxy coumarin-3-carboxylic acid

[1979] 735. The composition according to item 720, wherein the one or more fluorophore label are selected from the group consisting of 7-diethylamino-coumarin-3-carboxylic acid

[1980] 736. The composition according to item 720, wherein the one or more fluorophore label are selected from the group consisting of N-(((4-azidobenzoyl)amino)ethyl)-4-amino-3,6-disulfo-1,8-naphthalimide, dipotassium salt

[1981] 737. The composition according to item 720, wherein the one or more fluorophore label are selected from the group consisting of Alexa Fluor 430

[1982] 738. The composition according to item 720, wherein the one or more fluorophore label are selected from the group consisting of 3-perylenedodecanoic acid

[1983] 739. The composition according to item 720, wherein the one or more fluorophore label are selected from the group consisting of 8-hydroxypyrene-1,3,6-trisulfonic acid, trisodium salt

[1984] 740. The composition according to item 720, wherein the one or more fluorophore label are selected from the group consisting of 12-(N-(7-nitrobenz-2-oxa-1,3-diazol-4-yl)amino)dodecanoic acid

[1985] 741. The composition according to item 720, wherein the one or more fluorophore label are selected from the group consisting of N,N-dimethyl-N-(iodoacetyl)-N-(7-nitrobenz-2-oxa-1,3-diazol-4-yl)ethylenediamine

[1986] 742. The composition according to item 720, wherein the one or more fluorophore label are selected from the group consisting of Oregon Green 488 (difluoro carboxy fluorescein)

[1987] 743. The composition according to item 720, wherein the one or more fluorophore label are selected from the group consisting of 5-iodoacetamidofluorescein

[1988] 744. The composition according to item 720, wherein the one or more fluorophore label are selected from the group consisting of propidium iodide-DNA adduct

[1989] 745. The composition according to item 720, wherein the one or more fluorophore label are selected from the group consisting of Carboxy fluorescein

[1990] 746. The composition according to any of items 700 to 719, wherein the one or more labels is a fluorescent label.

[1991] 747. The composition according to item 746, wherein the one or more fluorescent label is a simple fluorescent label

[1992] 748. The composition according to item 747, wherein the one or more simple fluorescent label is selected from the group Fluor dyes, Pacific Blue™, Pacific Orange™, Cascade Yellow™

[1993] 749. The composition according to item 747, wherein the one or more simple fluorescent label is selected from the group AlexaFluor® (AF), AF405, AF488, AF500, AF514, AF532, AF546, AF555, AF568, AF594, AF610, AF633, AF635, AF647, AF680, AF700, AF710, AF750, AF800.

[1994] 750. The composition according to item 747, wherein the one or more simple fluorescent label is selected from the group Quantum Dot based dyes, QDot® Nanocrystals (Invitrogen, MolecularProbs), Qdot®525, Qdot®565, Qdot®585, Qdot®605, Qdot®655, Qdot®705, Qdot®800.

[1995] 751. The composition according to item 747, wherein the one or more simple fluorescent label is selected from the group DyLight™ Dyes (Pierce) (DL); DL549, DL649, DL680, DL800.

[1996] 752. The composition according to item 747, wherein the one or more simple fluorescent label is selected from the group Fluorescein (Flu) or any derivate of that, such as FITC

[1997] 753. The composition according to item 747, wherein the one or more simple fluorescent label is selected from the group Cy-Dyes, Cy2, Cy3, Cy3.5, Cy5, Cy5.5, Cy7.

[1998] 754. The composition according to item 747, wherein the one or more simple fluorescent label is selected from the group Fluorescent Proteins, RPE, PerCp, APC, Green fluorescent proteins; GFP and GFP derivated mutant proteins; BFP, CFP, YFP, DsRed, T1, Dimer2, mRFP1, MBanana, mOrange, dTomato, tdTomato, mTangerine, mStrawberry, mCherry.

[1999] 755. The composition according to item 747, wherein the one or more simple fluorescent label is selected from the group Tandem dyes, RPE-Cy5, RPE-Cy5.5, RPE-Cy7, RPE-AlexaFluor® tandem conjugates; RPE-Alexa610, RPE-TxRed, APC-Aleca600, APC-Alexa610, APC-Alexa750, APC-Cy5, APC-Cy5.5.

[2000] 756. The composition according to item 747, wherein the one or more simple fluorescent label is selected from the group multi fluorochrome assemblies, Multiple fluorochromes attached to a polymer molecule, such as a peptide/protein, Dextrane, polysaccharide, any combination of the fluorescent dyes involving in generation of FRET (Fluorescence resonance energy transfer) based techniques.

[2001] 757. The composition according to item 747, wherein the one or more simple fluorescent label is selected from the group ionophors; ion chelating fluorescent props, props that change wavelength when binding a specific ion, such as Calcium, props that change intensity when binding to a specific ion, such as Calcium.

[2002] 758. The composition according to any of items 700 to 719, wherein the one or more labels is capable of absorption of light

[2003] 759. The composition according to item 758, wherein the one or more labels capable of absorption of light is a chromophore.

[2004] 760. The composition according to item 758, wherein the one or more labels capable of absorption of light is a dye.

[2005] 761. The composition according to any of items 700 to 719, wherein the one or more labels is capable of emission of light after excitation

[2006] 762. The composition according to item 761, wherein the one or more labels capable of emission of light is one or more fluorochromes.

[2007] 763. The composition according to item 762, wherein the one or more fluorochrome is selected from the AlexaFluor® (AF) family, which include AF®350, AF405, AF430, AF488, AF500, AF514, AF532, AF546, AF555, AF568, AF594, AF610, AF633, AF635, AF647, AF680, AF700, AF710, AF750 and AF800

[2008] 764. The composition according to item 762, wherein the one or more fluorochrome is selected from the Quantum Dot (Qdot®) based dye family, which include Qdot®525, Qdot®565, Qdot®585, Qdot®605, Qdot®655, Qdot®705, Qdot®800

[2009] 765. The composition according to item 762, wherein the one or more fluorochrome is selected from the DyLight™ Dyes (DL) family, which include DL549, DL649, DL680, DL800

[2010] 766. The composition according to item 762, wherein the one or more fluorochrome is selected from the family of Small fluorescing dyes, which include FITC, Pacific Blue™, Pacific Orange™, Cascade Yellow™, Marina Blue™, DSred, DSred-2, 7-AAD, TO-Pro-3.

[2011] 767. The composition according to item 762, wherein the one or more fluorochrome is selected from the family of Cy-Dyes, which include Cy2, Cy3, Cy3.5, Cy5, Cy5.5, Cy7

[2012] 768. The composition according to item 762, wherein the one or more fluorochrome is selected from the family of Phycobili Proteins, which include R-Phycoerythrin (RPE), PerCP, Allophycocyanin (APC), B-Phycoerythrin, C-Phycocyanin.

[2013] 769. The composition according to item 762, wherein the one or more fluorochrome is selected from the family of Fluorescent Proteins, which include (E)GFP and GFP ((enhanced) green fluorescent protein) derived mutant proteins; BFP, CFP, YFP, DsRed, T1, Dimer2, mRFP1, MBanana, mOrange, dTomato, tdTomato, mTangerine.

[2014] 770. The composition according to item 762, wherein the one or more fluorochrome is selected from the family of Tandem dyes with RPE, which include RPE-Cy5, RPE-Cy5.5, RPE-Cy7, RPE-AlexaFluor® tandem conjugates; RPE-Alexa610, RPE-TxRed.

[2015] 771. The composition according to item 762, wherein the one or more fluorochrome is selected from the family of Tandem dyes with APC, which include APC-Aleca600, APC-Alexa610, APC-Alexa750, APC-Cy5, APC-Cy5.5.

[2016] 772. The composition according to item 762, wherein the one or more fluorochrome is selected from the family of Calcium dyes, which include Indo-1-Ca²⁺ Indo-2-Ca²⁺.

[2017] 773. The composition according to any of items 700 to 719, wherein the one or more labels is capable of reflection of light

[2018] 774. The composition according to item 773, wherein the one or more labels capable of reflection of light comprises gold

[2019] 775. The composition according to item 773, wherein the one or more labels capable of reflection of light comprises plastic

[2020] 776. The composition according to item 773, wherein the one or more labels capable of reflection of light comprises glass

[2021] 777. The composition according to item 773, wherein the one or more labels capable of reflection of light comprises polystyrene

[2022] 778. The composition according to item 773, wherein the one or more labels capable of reflection of light comprises pollen

[2023] 779. The composition according to any of items 700 to 719, wherein the one or more labels is a chemiluminescent label.

[2024] 780. The composition according to item 779, wherein the chemiluminescent labels is selected from the group luminol, isoluminol, theromatic acridinium ester, imidazole, acridinium salt and oxalate ester.

[2025] 781. The composition according to any of items 700 to 719, wherein the one or more labels is a bioluminescent label.

[2026] 782. The composition according to item 781, wherein the bioluminescent labels is selected from the group consisting of luciferin, luciferase and acquorin.

[2027] 783. The composition according to any of items 700 to 719, wherein the one or more labels is a radioactive label.

[2028] 784. The composition according to item 783, wherein the one or more radioactive labels is a radionuclide.

[2029] 785. The composition according to item 783, wherein the one or more radioactive labels is an isotope.

[2030] 786. The composition according to item 783, wherein the one or more radioactive labels comprises α rays.

[2031] 787. The composition according to item 783, wherein the one or more radioactive labels comprises β rays.

[2032] 788. The composition according to item 783, wherein the one or more radioactive labels comprises γ rays.

[2033] 789. The composition according to any of items 700 to 719, wherein the one or more labels is detectable by NMR (nuclear magnetic resonance form paramagnetic molecules)

[2034] 790. The composition according to any of items 700 to 719, wherein the one or more labels is an enzyme label.

[2035] 791. The composition according to item 790, wherein the enzyme catalyze a reaction between chemicals in the near environment of the labeling molecules, producing a light signal (chemi-luminescence)

[2036] 792. The composition according to item 790, wherein the enzyme catalyze a reaction between chemicals in the near environment of the labeling molecules, resulting in precipitation of chromophor dyes

[2037] 793. The composition according to item 790, wherein the enzyme catalyze a reaction between chemicals in the near environment of the labeling molecules, resulting in precipitates that can be detected by an additional layer of detection molecules

[2038] 794. The composition according to item 790, wherein the enzyme label is selected from the group peroxidases, malate dehydrogenase, staphylococcal nuclease, delta-5-steroid isomerase, yeast alcohol dehydrogenase, alpha-glycerophosphate, dehydrogenase, triose phosphate isomerase, horseradish peroxidase, alkaline phosphatase, asparaginase, glucose oxidase, beta-galactosidase, ribonuclease, urease, catalase, glucose-6-phosphate dehydrogenase, glucoamylase and acetylcholinesterase.

[2039] 795. The composition according to item 790, wherein the enzyme label is horseradish peroxidase

[2040] 796. The composition according to item 790, wherein the enzyme label is horseradish peroxidase and the substrate is diaminobenzidine (DAB)

[2041] 797. The composition according to item 790, wherein the enzyme label is horseradish peroxidase and the substrate is 3-amino-9-ethyl-carbazole (AEC+)

[2042] 798. The composition according to item 790, wherein the enzyme label is horseradish peroxidase and the substrate is biotinyl tyramide

[2043] 799. The composition according to item 790, wherein the enzyme label is horseradish peroxidase and the substrate is fluorescein tyramide

[2044] 800. The composition according to item 790, wherein the enzyme label is alkaline phosphatase

[2045] 801. The composition according to item 790, wherein the enzyme label is alkaline phosphatase and the substrate is Fast red dye

[2046] 802. The composition according to any of items 700 to 719, wherein the one or more labels is a ionophore or chelating chemical compound binding to specific ions such as Ca²⁺

[2047] 803. The composition according to any of items 700 to 719, wherein the one or more labels is a lanthanide

[2048] 804. The composition according to item 803, wherein the lanthanide comprises fluorescence

[2049] 805. The composition according to item 803, wherein the lanthanide comprises Phosphorescence

[2050] 806. The composition according to item 803, wherein the lanthanide is paramagnetic

[2051] 807. The composition according to any of items 700 to 719, wherein the one or more labels is a DNA fluorescing stain

[2052] 808. The composition according to item 807, wherein the DNA fluorescing stain is Propidium iodide

[2053] 809. The composition according to item 807, wherein the DNA fluorescing stain is Hoechst stain

[2054] 810. The composition according to item 807, wherein the DNA fluorescing stain is DAPI

[2055] 811. The composition according to item 807, wherein the DNA fluorescing stain is AMC

[2056] 812. The composition according to item 807, wherein the DNA fluorescing stain is DraQ5™

[2057] 813. The composition according to item 807, wherein the DNA fluorescing stain is Acridine orange

[2058] 814. The composition according to item 457, wherein the MHC-peptide complex (a-b-P) is attached to the second multimerization domain comprising an avidin or streptavidin via a linkage comprising a biotin moiety.

[2059] 815. The composition according to any of items 457 to 814, wherein the MHC-peptide complex is linked to the second multimerization domain by a second linker moiety.

[2060] 816. The composition according to item 815, wherein the MHC-peptide complex is linked to the second multimerization domain by a covalent linker moiety.

[2061] 817. The MHC multimer according to items 814 and 815, wherein the linkage of the second multimerization domain and at least one MHC-peptide complexes is formed by a binding entity X attached to, or being part of, the second multimerization domain, and a binding entity Y attached to, or being part of at least one of the MHC-peptide complexes.

[2062] 818. The MHC multimer according to items 814 and 815, wherein the linker moiety linking the second multimerization domain and the MHC-peptide complex comprises the linker moiety XY, wherein the linker moiety XY results from a reaction of the moiety X comprising one or more reactive groups and the moiety Y comprising one or more reactive groups, wherein at least some of said reactive groups are capable of reacting with each other.

[2063] 819. The composition according to item 818, wherein the moiety X comprises a nucleophilic group.

[2064] 820. The composition according to item 819, wherein the nucleophilic group is selected from the group consisting of —NH₂, —OH, —SH, —NH—NH₂.

[2065] 821. The composition according to item 818, wherein the moiety Y comprises an electrophilic group.

[2066] 822. The composition according to item 821, wherein the electrophilic group is selected from the group consisting of CHO, COOH and CO.

[2067] 823. The MHC multimer according to items 814 and 815, wherein at least one of the reactive groups on one of the moieties X and Y comprises a radical capable of reacting with a reactive group forming part of the other moiety.

[2068] 824. The MHC multimer according to items 814 and 815, wherein X and Y comprises reactive groups natively associated with the second multimerization domain and/or the MHC-peptide complexes.

[2069] 825. The MHC multimer according to items 814 and 815, wherein X and Y comprises reactive groups not natively associated with the second multimerization domain and/or the MHC-peptide complex.

[2070] 826. The MHC multimer according to items 814 and 815, wherein the linker moiety forms a covalent link between the second multimerization domain and at least one of the MHC-peptide complexes.

[2071] 827. The MHC multimer according to items 814 and 815, wherein the reactive groups of MHC-peptide complexes include amino acid side chains selected from the group consisting of —NH₂, —OH, —SH, and —NH—

[2072] 828. The MHC multimer according to items 814 and 815, wherein the reactive groups of the second multimerization domain include hydroxyls of polysaccharides such as dextrans

[2073] 829. The MHC multimer according to items 814 and 815, wherein the reactive groups of the second multimerization domain selected from the group consisting of amino acid side chains comprising —NH₂, —OH, —SH, and —NH— of polypeptides

[2074] 830. The MHC multimer according to items 814 and 815, wherein one of the polypeptides of the MHC-peptide complex is linked by a protein fusion to the second multimerization domain

[2075] 831. The MHC multimer according to items 814 and 815, wherein one of the polypeptides of the MHC-peptide complex is linked by a protein fusion to the second multimerization domain, wherein an acyl group and an amino group react to form an amide bond

[2076] 832. The composition according to item 457, wherein one of the polypeptides of the MHC-peptide complex is linked by non-native reactive groups to the second multimerization domain.

[2077] 833. The composition according to item 457, wherein the reactive groups include reactive groups that are attached to the second multimerization domain through association of a linker molecule comprising the reactive group.

[2078] 834. The composition according to item 457, wherein the reactive groups include reactive groups that are attached to the MHC-peptide complex through association of a linker molecule comprising the reactive group.

[2079] 835. The composition according to item 473, wherein dextran is activated by reaction of the dextran hydroxyls with divinyl sulfon

[2080] 836. The composition according to item 835, wherein dextran is activated by a multistep reaction that results in the decoration of the dextran with maleimide groups.

[2081] 837. The composition according to item 457, wherein the second multimerization domain comprises one or more nucleophilic groups

[2082] 838. The composition according to item 837, wherein the nucleophilic group is selected from the group consisting of —NH₂, —OH, —SH, —CN, —NH—NH₂

[2083] 839. The composition according to item 457, wherein the second multimerization domain is selected from the group consisting of polysaccharides, polypeptides comprising e.g. lysine, serine, and cysteine.

[2084] 840. The composition according to item 457, wherein the second multimerization domain comprises one or more electrophilic groups.

[2085] 841. The composition according to item 840, wherein the electrophilic group is selected from the group consisting of —COOH, —CHO, —CO, NHS-ester, tosyl-activated ester, and other activated esters, acid-anhydrides.

[2086] 842. The composition according to item 457, wherein the second multimerization domain is selected from the group consisting of polypeptides comprising e.g. glutamate and aspartate, or vinyl sulfone activated dextran.

[2087] 843. The composition according to item 457, wherein the second multimerization domain comprises one or more radicals.

[2088] 844. The composition according to item 457, wherein the second multimerization domain comprises one or more conjugated double bonds.

[2089] 845. The composition according to item 457, wherein the second multimerization domain comprises one or more beads and one or more linker moieties.

[2090] 846. The MHC multimer according to any of the items 814 to 845, wherein the linker is a flexible linker.

[2091] 847. The MHC multimer according to any of the items 814 to 845, wherein the linker is a rigid linker.

[2092] 848. The MHC multimer according to any of the items 814 to 845, wherein the linker is a water-soluble linker.

[2093] 849. The MHC multimer according to any of the items 814 to 845, wherein the linker is a cleavable linker.

[2094] 850. The composition according to item 849, wherein the cleavable linker is selected from linkers depicted in (FIG. 2) in PCT/DK2008/050167.

[2095] 851. The composition according to item 849, wherein the cleavable linker is cleavable at physiological conditions

[2096] 852. The MHC multimer according to items 814 and 815, wherein the MHC-peptide complex is linked to the second multimerization domain by a non-covalent linker moiety.

[2097] 853. The composition according to item 852, wherein the non-covalent linkage comprises natural dimerization

[2098] 854. The composition according to item 853, wherein the natural dimerization comprises antigen-antibody pairs

[2099] 855. The composition according to item 853, wherein the natural dimerization comprises DNA-DNA interactions

[2100] 856. The composition according to item 852, wherein the non-covalent linkage comprises natural interactions

[2101] 857. The composition according to item 856, wherein the natural interaction comprises biotin and streptavidin

[2102] 858. The composition according to item 686, wherein the bead is coated with streptavidin monomers, which in turn are associated with biotinylated MHC complexes

[2103] 859. The composition according to item 686, wherein the bead is coated with streptavidin tetramers, which in turn are associated with 0, 1, 2, 3, or 4 biotinylated MHC complexes

[2104] 860. The composition according to item 686, wherein the bead is coated with a polysaccharide, such as a polysaccharide comprising a dextran moiety.

[2105] 861. The composition according to item 856, wherein the natural interaction comprises the interaction of MHC complexes (comprising full-length polypeptide chains, including the transmembrane portion) with the cell membrane of for example dendritic cells

[2106] 862. The composition according to item 852, wherein the non-covalent linkage comprises artificial interactions

[2107] 863. The composition according to item 862, wherein the artificial interaction comprises His₆ tag interacting with Ni-NTA

[2108] 864. The composition according to item 862, wherein the artificial interaction comprises PNA-PNA

[2109] 865. The composition according to item 852, wherein the non-covalent linkage comprises non-specific adsorption

[2110] 866. The composition according to item 865, wherein the non-specific adsorption comprises adsorption of proteins onto surfaces

[2111] 867. The composition according to item 852, wherein the non-covalent linkage comprises the pentamer structure

[2112] 868. The composition according to item 867, wherein the non-covalent linkage comprises interactions selected from the group streptavidin/biotin, avidin/biotin, antibody/antigen, DNA/DNA, DNA/PNA, DNA/RNA, PNA/PNA, LNA/DNA, leucine zipper e.g. Fos/Jun, IgG dimeric protein, IgM multivalent protein, acid/base coiled-coil helices, chelate/metal ion-bound chelate, streptavidin (SA) and avidin and derivatives thereof, biotin, immunoglobulins, antibodies (monoclonal, polyclonal, and recombinant), antibody fragments and derivatives thereof, leucine zipper domain of AP-1 (jun and fos), hexa-his (metal chelate moiety), hexa-hat GST (glutathione S-transferase) glutathione affinity, Calmodulin-binding peptide (CBP), Strep-tag, Cellulose Binding Domain, Maltose Binding Protein, S-Peptide Tag, Chitin Binding Tag, Immuno-reactive Epitopes, Epitope Tags, E2Tag, HA Epitope Tag, Myc Epitope, FLAG Epitope, AU1 and AU5 Epitopes, Glu-Glu Epitope, KT3 Epitope, IRS Epitope, Btag Epitope, Protein Kinase-C Epitope, VSV Epitope, lectins that mediate binding to a diversity of compounds, including carbohydrates, lipids and proteins, e.g. Con A (Canavalia ensiformis) or WGA (wheat germ agglutinin) and tetranectin or Protein A or G (antibody affinity).

[2113] 869. The composition according to item 1, wherein the one or more pharmamers comprises one or more organic molecule-based pharmamers.

[2114] 870. The composition according to item 1, wherein the one or more pharmamers comprises one or more functionalized cyclic structures such as benzene rings where e.g. a benzene ring is functionalized and covalently linked to e.g. three immunologically active molecules.

[2115] 871. The composition according to item 1, wherein the one or more pharmamers comprises one or more cell-based pharmamers.

[2116] 872. The composition according to item 1, wherein the one or more pharmamers comprises one or more dendritic cells and/or one or more antigen presenting cells (APCs).

[2117] 873. The composition according to item 1, wherein the one or more pharmamers comprises one or more membrane-based pharmamers.

[2118] 874. The composition according to item 1, wherein the one or more pharmamers comprises one or more liposomes and/or micelles e.g. carrying immunologically active molecules or complexes in their membranes.

[2119] 875. The composition according to item 1, wherein the one or more pharmamers comprises one or more polymer-based pharmamers.

[2120] 876. The composition according to item 1, wherein the one or more pharmamers comprises one or more molecule constructs where immunologically active molecules or complexes are bound covalently or non-covalently to a dextran.

[2121] 877. The composition according to item 1, wherein the one or more pharmamers comprises one or more backbone/multimerisation domain(s).

[2122] 878. The composition according to item 1, wherein the one or more pharmamers comprises one or more particles such as beads.

[2123] 879. The composition according to item 1, wherein the one or more pharmamers comprises one or more solid supports with immunologically active molecules immobilized on the surface.

[2124] 880. The composition according to item 1, wherein the one or more pharmamers comprises one or more multimerization domain(s) such as one or more cells, polymers, proteins or other molecular structures, or particles and solid supports.

[2125] 881. The composition according to item 1, wherein the one or more pharmamers comprises one or more pharmamers in solid form and/or one or more pharmamers in insoluble form and/or one or more pharmamers in soluble form and/or one or more pharmamers in suspension.

[2126] 882. The composition according to item 1, wherein the one or more pharmamers comprises one or more biologically active molecules and one or more multimerization domain(s).

[2127] 883. The composition according to item 882, wherein the one or more biologically active molecules comprises one or more molecules with adjuvant effects.

[2128] 884. The composition according to item 882, wherein the one or more biologically active molecules comprises one or more immune targets e.g. antigens.

[2129] 885. The composition according to item 882, wherein the one or more biologically active molecules comprises one or more molecules with biological activity e.g. enzymes.

[2130] 886. The composition according to item 882, wherein the one or more biologically active molecules comprises one or more regulators of receptor activity.

[2131] 887. The composition according to item 882, wherein the one or more biologically active molecules comprises one or more receptor ligands.

[2132] 888. The composition according to item 882, wherein the one or more biologically active molecules comprises one or more immune potentiators.

[2133] 889. The composition according to item 882, wherein the one or more biologically active molecules comprises one or more drugs.

[2134] 890. The composition according to item 882, wherein the one or more biologically active molecules comprises one or more toxins.

[2135] 891. The composition according to item 882, wherein the one or more biologically active molecules comprises one or more co-receptors.

[2136] 892. The composition according to item 882, wherein the one or more biologically active molecules comprises one or more proteins.

[2137] 893. The composition according to item 882, wherein the one or more biologically active molecules comprises one or more peptides.

[2138] 894. The composition according to item 882, wherein the one or more biologically active molecules comprises one or more sugar moieties.

[2139] 895. The composition according to item 882, wherein the one or more biologically active molecules comprises one or more lipid groups.

[2140] 896. The composition according to item 882, wherein the one or more biologically active molecules comprises one or more nucleic acids including siRNA and microRNA.

[2141] 897. The composition according to item 882, wherein the one or more biologically active molecules comprises one or more nano particles.

[2142] 898. The composition according to item 882, wherein the one or more biologically active molecules comprises one or more small molecules.

[2143] 899. The composition according to item 882, wherein the one or more biologically active molecules comprises one or more membranes.

[2144] 900. The composition according to item 882, wherein the one or more biologically active molecules comprises one or more liposomes.

[2145] 901. The composition according to item 882, wherein the one or more biologically active molecules comprises one or more immunological active molecules.

[2146] 902. The composition according to item 882, wherein the one or more biologically active molecules comprises more than one identical immunological active molecules.

[2147] 903. The composition according to item 882, wherein the one or more biologically active molecules comprises more than one different immunological active molecules.

[2148] 904. The composition according to item 901, wherein the one or more immunological active molecules comprises one or more biological active molecules including proteins, co-stimulatory molecules, cell modulating molecules, receptors, accessory molecules, adhesion molecules, natural ligands, and toxic molecules, as well as antibodies and recombinant binding molecules to any of the foregoing, and combinations thereof.

[2149] 905. The composition according to item 901, wherein the one or more immunological active molecules comprises one or more molecule(s) selected from the group consisting of MHC Class 1 proteins like HLA-A, HLA-B, HLA-C alone or in complex with HLA-b2Microglobulin with or without peptide in the binding groove.

[2150] 906. The composition according to item 901, wherein the one or more immunological active molecules comprises one or more molecule(s) selected from the group consisting of Class 1-like proteins like MICA, MICB, CD1d, HLA-E, HLA-F, HLA-G, HLA-H, ULBP-1, ULBP-2, and ULBP-3.

[2151] 907. The composition according to item 901, wherein the one or more immunological active molecules comprises one or more molecule(s) selected from the group consisting of HLA class 2 proteins like HLA-DR (HLA-DRA, HLA-DRB1, HLA-DRB3, HLA-DRB4, HLA-DRB5), HLA-DQ (HLA-DQA1, HLADQA2, HLA-DQB1, HLA-DQB2), HLA-DP (HLA-DPA1, HLA-DPB1), HLA-DO (HLA-DOA, HLA-DOB), HLA-DM (HLA-DMA, HLA-DMB) alone or in complexes consisting of class 2 A- and B-chains with or without peptide in the binding groove.

[2152] 908. The composition according to item 901, wherein the one or more immunological active molecules comprises one or more molecule(s) selected from the group consisting of Cytokines; IFN-alpha, IFN-beta, IFN-gamma, IL-1, IL-2, IL-3, IL-4, IL-6, IL-7, IL-8, IL-10, IL-11, IL-12, IL-15, IL-16, IL-17, IL-18, IL-19, IL-20, IL-21, IL-22, IL-23, IL-24, IL-25, IL-26, IL-27, IL-28, -IL-29, IL-30, IL-31, IL-32, IL-33, IL-34, IL-35, CSFs (colony-stimulating factors), c-Kit, EPO, TNF-alfa, TNF-beta, Lymphotoxin; Cytokine receptors like IL-1R, IL-2R, IL-3R, IL-4R, IL-5R, IL-6R, IL-7R, IL-8R, IL-9-R, IL-10R, IL-11R, IL-12R, IL-13R, IL-15R, IL-18R, IL-20R, IL-21R, IL-22R, IL-23R, IL-27R, IL-28R; Chemokines such as CXCL1, CXCL2, CXCL3, CXCL4, CXCL5, CXCL6, CXCL7, CXCL8, CXCL9, CXCL10, CXCL11, CXCL12, CXCL13, CXCL14, CXCL15, CXCL16, CCL1, CCL2, CCL3, CCL4, CCL5, CCL6, CCL7, CCL8, CCL8, CCL9, CCL10, CCL11, CCL12, CCL13, CCL14, CCL15, CCL16, CCL17, CCL18, CCL19, CCL20, CCL21, CCL22, CCL23, CCL24, CCL25, CCL26, CCL27, CCL28, CXCR4, CCRL2; Chemokine receptors like CCR1, CCR2, CCR3, CCR4, CCR5, CCR6, CCR7, CCR8, CCR9, CCR10, CCR11, CXCR1, CXCR2, CXCR3, CXCR4, CXCR5, CXCR6, CXCR7, and CX3CR1.

[2153] 909. The composition according to item 901, wherein the one or more immunological active molecules comprises one or more molecule(s) selected from the group consisting of Toll-like receptors such as TLR1, TLR2, TLR3, TLR4, TLR5, TLR6, TLR7, TLR8, TLR9, and TLR10.

[2154] 910. The composition according to item 901, wherein the one or more immunological active molecules comprises one or more molecule(s) selected from the group consisting of Toll like receptor ligands such as multiple triacyl lipopeptides, multiple diacyl lipopeptides, multiple glycolipids, multiple lipopeptides, multiple lipoproteins, lipoteichoic acid, peptidoglycans, heat shock proteins (HSP70, HSP90 and others), zymosan, single- and double-stranded RNA, Poly I:C, lipo-polysaccharides, fibrinogen, heparin sulphate fragments, hyaluronic acid fragments, flagellin, imidazoquinoline, loxoribine (guanosine analogue), bropirimine, Imiquimod, unmethylated CpG DNA.

[2155] 911. The composition according to item 901, wherein the one or more immunological active molecules comprises one or more molecule(s) selected from the group consisting of Viral entry receptors/molecules such as Ku70, Pvr, Prr1, HVEM, EphrinB2, cellular integrins (in particular alpha2beta1, alpha6beta1 alphaVbeta3), CD81, CD155, SR-B1, claudin-1, xCT, human nectin-2, LIGHT, TLR3, LIR, Heparan sulphate proteoglycans, GPI anchored proteins, hemeagglutinin receptor.

[2156] 912. The composition according to item 901, wherein the one or more immunological active molecules comprises one or more molecule(s) selected from the group consisting of Bacterial entry receptors/molecules like CD48, CEACAM-1, -2, -3, -4, -5, -6, invasion, internalin (InIA), InIB; Fc receptors like ε (FcεRI, FcεRII)—γ (FcγRI, FcγRII, FcγRIII)—α/μ (FcαRI, Fcα/μR)—Neonatal FcR.

[2157] 913. The composition according to item 901, wherein the one or more immunological active molecules comprises one or more molecule(s) selected from the group consisting of Lymphocyte homing receptors such as CD44, L-selectin, VLA-4 (CD49a, b, c, d, e, f), LFA-1.

[2158] 914. The composition according to item 901, wherein the one or more immunological active molecules comprises one or more molecule(s) selected from the group consisting of Co-stimulatory molecules such as CD2, CD3, CD4, CD5, CD8, CD9, CD27, CD28, CD30, CD69, CD134 (OX40), CD120, CD137 (4-1BB), CD147, CDw150 (SLAM), CD152 (CTLA-4), CD153 (CD30L), CD40L (CD154), NKG2D, ICOS, PD-1, Fas (CD95), FasL, CD40, CD58, CD70, CD72, B7.1 (CD80), B7.2 (CD86), B7RP-1, B7-H3, PD-L1, PD-L2, CD134L, CD137L, ICOSL.

[2159] 915. The composition according to item 901, wherein the one or more immunological active molecules comprises one or more molecule(s) selected from the group consisting of NK cell receptors/molecules such as CD16, NKp30, NKp44, NKp46, NKp80, 2B4, KIR3DL1, KIR3DL″, KIR3DS1, KIR2DL1, KIRDL2, KIR2DL3, KIR2DL4, KIR2DL5, CD94/NKG2A, CD94/NKG2C, CD94/NKG2E, CD94/NKG2H, NKG2ADNKG2D.

[2160] 916. The composition according to item 901, wherein the one or more immunological active molecules comprises one or more molecule(s) selected from the group consisting of Adhesion molecules such as ICAM-1, ICAM-2, GlyCAM-1, VCAM, CD34.

[2161] 917. The composition according to item 901, wherein the one or more immunological active molecules comprises one or more molecule(s) selected from the group consisting of Anti microbial peptides such Defensins and cathelicidin derived peptide LL-37.

[2162] 918. The composition according to item 901, wherein the one or more immunological active molecules comprises one or more molecule(s) selected from the group consisting of anti-LFA-1, anti-CD44, anti-beta7, anti-selectin L, anti-selectin E, and anti-selectin P, toxic molecules selected from toxins, enzymes, antibodies, radioisotopes, chemiluminescent substances, bioluminescent substances, polymers, metal particles, and haptens, such as cyclophosphamide, methotrexate, Azathioprine, mizoribine, 15-deoxyspergualin, neomycin, staurosporine, genestein, herbimycin A, Pseudomonas exotoxin A, saporin, Rituxan, Ricin, gemtuzumab ozogamicin, Shiga toxin, vitamin D3, IL-2 toxins, cyclosporin, FK-506, rapamycin, TGF-beta, clotrimazole, nitrendipine, and charybdotoxin, heavy'metals like inorganic and organic mercurials, and FN18-CRM9, radioisotopes such as incorporated isotopes of iodide, cobalt, selenium, tritium, and phosphor, and haptens such as DNP, and digoxiginin, and combinations of any of the foregoing, as well as antibodies (monoclonal, polyclonal, and recombinant) to the foregoing, where relevant.

[2163] 919. The composition according to item 901, wherein the one or more immunological active molecules comprises one or more molecule(s) selected from the group consisting of antibody derivatives or fragments thereof.

[2164] 920. The composition according to item 901, wherein the one or more immunological active molecules comprises one or more molecule(s) selected from the group consisting of biologically active molecules derived from viral or bacterial proteins or fragments thereof.

[2165] 921. The composition according to item 882, wherein the vaccine further comprises one or more biologically active molecules in order to affect the characteristics of the constructs, e.g. with respect to binding properties, effects, antigenicity, specificity, solubility, stability, or detectability.

[2166] 922. The composition according to item 882, wherein the one or more biologically active molecules further comprises a flexible or rigid, and water soluble, linker that allows for the immobilized biologically active molecules to interact efficiently with surrounding cells and molecules.

[2167] 923. The composition according to item 882, wherein the one or more biologically active molecules further comprises a cleavable linker allowing for release of the biologically active molecules from the multimerization domain such as a bead.

[2168] 924. The composition according to item 1, wherein the one or more pharmamers has a molecular weight in the range 50,000 Da to 5,000,000 Da, such as from 50,000 Da to 4,000,000 Da; such as from 50,000 Da to 3,000,000 Da; such as from 50,000 Da to 2,000,000; such as from 50,000 Da and 1,000,000 Da, such as from 50,000 Da to 980,000; for example from 50,000 Da to 960,000; such as from 50,000 Da to 940,000; for example from 50,000 Da to 920,000; such as from 50,000 Da to 900,000; for example from 50,000 Da to 880,000; such as from 50,000 Da to 860,000; for example from 50,000 Da to 840,000; such as from 50,000 Da to 820,000; for example from 50,000 Da to 800,000; such as from 50,000 Da to 780,000; for example from 50,000 Da to 760,000; such as from 50,000 Da to 740,000; for example from 50,000 Da to 720,000; such as from 50,000 Da to 700,000; for example from 50,000 Da to 680,000; such as from 50,000 Da to 660,000; for example from 50,000 Da to 640,000; such as from 50,000 Da to 620,000; for example from 50,000 Da to 600,000; such as from 50,000 Da to 580,000; for example from 50,000 Da to 560,000; such as from 50,000 Da to 540,000; for example from 50,000 Da to 520,000; such as from 50,000 Da to 500,000; for example from 50,000 Da to 480,000; such as from 50,000 Da to 460,000; for example from 50,000 Da to 440,000; such as from 50,000 Da to 420,000; for example from 50,000 Da to 400,000; such as from 50,000 Da to 380,000; for example from 50,000 Da to 360,000; such as from 50,000 Da to 340,000; for example from 50,000 Da to 320,000; such as from 50,000 Da to 300,000; for example from 50,000 Da to 280,000; such as from 50,000 Da to 260,000; for example from 50,000 Da to 240,000; such as from 50,000 Da to 220,000; for example from 50,000 Da to 200,000; such as from 50,000 Da to 180,000; for example from 50,000 Da to 160,000; such as from 50,000 Da to 140,000; for example from 50,000 Da to 120,000; such as from 50,000 Da to 100,000; for example from 50,000 Da to 80,000; such as from 50,000 Da to 60,000; such as from 100,000 Da to 980,000; for example from 100,000 Da to 960,000; such as from 100,000 Da to 940,000; for example from 100,000 Da to 920,000; such as from 100,000 Da to 900,000; for example from 100,000 Da to 880,000; such as from 100,000 Da to 860,000; for example from 100,000 Da to 840,000; such as from 100,000 Da to 820,000; for example from 100,000 Da to 800,000; such as from 100,000 Da to 780,000; for example from 100,000 Da to 760,000; such as from 100,000 Da to 740,000; for example from 100,000 Da to 720,000; such as from 100,000 Da to 700,000; for example from 100,000 Da to 680,000; such as from 100,000 Da to 660,000; for example from 100,000 Da to 640,000; such as from 100,000 Da to 620,000; for example from 100,000 Da to 600,000; such as from 100,000 Da to 580,000; for example from 100,000 Da to 560,000; such as from 100,000 Da to 540,000; for example from 100,000 Da to 520,000; such as from 100,000 Da to 500,000; for example from 100,000 Da to 480,000; such as from 100,000 Da to 460,000; for example from 100,000 Da to 440,000; such as from 100,000 Da to 420,000; for example from 100,000 Da to 400,000; such as from 100,000 Da to 380,000; for example from 100,000 Da to 360,000; such as from 100,000 Da to 340,000; for example from 100,000 Da to 320,000; such as from 100,000 Da to 300,000; for example from 100,000 Da to 280,000; such as from 100,000 Da to 260,000; for example from 100,000 Da to 240,000; such as from 100,000 Da to 220,000; for example from 100,000 Da to 200,000; such as from 100,000 Da to 180,000; for example from 100,000 Da to 160,000; such as from 100,000 Da to 140,000; for example from 100,000 Da to 120,000; such as from 150,000 Da to 980,000; for example from 150,000 Da to 960,000; such as from 150,000 Da to 940,000; for example from 150,000 Da to 920,000; such as from 150,000 Da to 900,000; for example from 150,000 Da to 880,000; such as from 150,000 Da to 860,000; for example from 150,000 Da to 840,000; such as from 150,000 Da to 820,000; for example from 150,000 Da to 800,000; such as from 150,000 Da to 780,000; for example from 150,000 Da to 760,000; such as from 150,000 Da to 740,000; for example from 150,000 Da to 720,000; such as from 150,000 Da to 700,000; for example from 150,000 Da to 680,000; such as from 150,000 Da to 660,000; for example from 150,000 Da to 640,000; such as from 150,000 Da to 620,000; for example from 150,000 Da to 600,000; such as from 150,000 Da to 580,000; for example from 150,000 Da to 560,000; such as from 150,000 Da to 540,000; for example from 150,000 Da to 520,000; such as from 150,000 Da to 500,000; for example from 150,000 Da to 480,000; such as from 150,000 Da to 460,000; for example from 150,000 Da to 440,000; such as from 150,000 Da to 420,000; for example from 150,000 Da to 400,000; such as from 150,000 Da to 380,000; for example from 150,000 Da to 360,000; such as from 150,000 Da to 340,000; for example from 150,000 Da to 320,000; such as from 150,000 Da to 300,000; for example from 150,000 Da to 280,000; such as from 150,000 Da to 260,000; for example from 150,000 Da to 240,000; such as from 150,000 Da to 220,000; for example from 150,000 Da to 200,000; such as from 150,000 Da to 180,000; for example from 150,000 Da to 160,000.

[2169] 925. The composition according to item 1, wherein the one or more pharmamers has a molecular weight in the range 50,000 Da to 5,000,000 Da, such as from 50,000 Da to 100,000 Da, for example from 100,000 Da to 200,000 Da, such as from 200,000 Da to 300,000 Da, for example from 300,000 Da to 400,000 Da, such as from 400,000 Da to 500,000 Da, for example from 500,000 Da to 600,000 Da, such as from 600,000 Da to 700,000 Da, for example from 700,000 Da to 800,000 Da, such as from 800,000 Da to 900,000 Da, for example from 900,000 Da to 1,000,000 Da, such as from 1,000,000 Da to 1,200,000 Da, for example from 1,200,000 Da to 1,400,000 Da, such as from 1,400,000 Da to 1,600,000 Da, for example from 1,600,000 Da to 1,800,000 Da, such as from 1,800,000 Da to 2,000,000 Da, for example from 2,000,000 Da to 2,200,000 Da, such as from 2,200,000 Da to 2,400,000 Da, for example from 2,400,000 Da to 2,600,000 Da, such as from 2,600,000 Da to 2,800,000 Da, for example from 2,800,000 Da to 3,000,000 Da, such as from 3,000,000 Da to 3,200,000 Da, for example from 3,200,000 Da to 3,400,000 Da, such as from 3,400,000 Da to 3,600,000 Da, for example from 3,600,000 Da to 3,800,000 Da, such as from 3,800,000 Da to 4,000,000 Da, for example from 4,000,000 Da to 4,200,000 Da, such as from 4,200,000 Da to 4,400,000 Da, for example from 4,400,000 Da to 4,600,000 Da, such as from 4,600,000 Da to 4,800,000 Da, for example from 4,800,000 Da to 5,000,000 Da.

[2170] 926. The composition according to item 882, wherein the one or more multimerization domains(s) comprises one or more soluble multimerization domain(s).

[2171] 927. The composition according to item 882, wherein the one or more multimerization domains(s) comprises one or more insoluble multimerization domain(s).

[2172] 928. The composition according to item 882, wherein the one or more multimerization domains(s) comprises one or more multimerization domains selected from the group consisting of polysaccharides, dextrans, carboxy methyl dextran, dextran polyaldehyde, carboxymethyl dextran lactone, and cyclodextrins, pullulans, schizophyllan, scleroglucan, xanthan, gellan, O-ethylamino guaran, chitins and chitosans including 6-O-carboxymethyl chitin and N-carboxymethyl chitosan, derivatised cellolosics including carboxymethyl cellulose, carboxymethyl hydroxyethyl cellulose, hydroxy-ethyl cellulose, 6-amino-6-deoxy cellulose and O-ethyl-amine cellulose, hydroxylated starch, hydroxypropyl starch, hydroxyethyl starch, carrageenans, alginates, and agarose, synthetic polysaccharides including ficoll and carboxy-methylated ficoll, vinyl polymers including poly(acrylic acid), poly(acryl amides), poly(acrylic esters), poly(2-hydroxy ethyl methacrylate), poly(methyl methacrylate), poly(maleic acid), poly(maleic anhydride), poly(acrylamide), poly(ethyl-co-vinyl acetate), poly(methacrylic acid), poly(vinyl-alcohol), poly(vinyl alcohol-co-vinyl chloroacetate), aminated poly(vinyl alcohol), and co block polymers thereof, poly ethylene glycol (PEG) or polypropylene glycol or poly(ethylene oxide-co-propylene oxides) comprising polymer backbones including linear, comb-shaped or StarBurst dendrimers, poly amino acids including polylysines, polyglutamic acid, polyurethanes, poly(ethylene imines), pluriol, proteins including peptides, polypeptides, antigenbinding peptides, albumins, immunoglobulins, coiled-coil helixes e.g. Fos-Jun or Fos-Jun like or coiled-coiled dimers/trimers/tetramers/pentamers, Streptavidin, Avidin, Streptactin, T-cell receptors other protein receptors and virus-like proteins (VLP), and polynucleotides, DNA, RNA, PNA, LNA, oligonucleotides and oligonucleotide dendrimer constructs and small organic molecules including but not limited to steroids, peptides, linear or cyclic structures, aromatic structures, aliphatic structures.

[2173] 929. The composition according to item 882, wherein the one or more multimerization domains(s) comprises cells e.g. dendritic cells, antigen presenting cell, B-cell, T-cell Macrophages, Kupfer cells, Langerhans cells, transfected cells expressing biologically active proteins, including hybridoma cells, yeast-cells, insect-cells, CHO cells, any cell biologically active molecules, cell-like structures e.g. micelles, liposomes, and phages e.g. filamentous phages and viral or viral-like particles.

[2174] 930. The composition according to item 882, wherein the one or more multimerization domains(s) comprises one or more solid supports including but not limited to beads, particulate matters and other surfaces.

[2175] 931. The composition according to item 882, wherein the one or more multimerization domains(s) comprises one or more self-assembling multimeric structures.

[2176] 932. The composition according to item 882, wherein the one or more multimerization domains(s) comprises mixed forms of multimerization domains such as e.g. dextran coupled with Streptavidin.

[2177] 933. The composition according to item 882, wherein the one or more multimerization domains(s) comprises one or more multimerisation domains made of Streptavidin or Avidin whereto biotin, biotin-like peptides or other biotin-like molecules can bind.

[2178] 934. The composition according to item 882, wherein the one or more multimerization domains(s) comprises dextran whereto biologically active molecules are attached directly through a linker.

[2179] 935. The composition according to item 882, wherein the one or more multimerization domains(s) comprises divinylsulfone activated dextran whereto biologically active molecules are coupled directly e.g. through —SH group(s) or amine(s) in the biologically active molecules, dextran coupled with SA whereto biologically active molecules are attached through a biotin on the biologically active molecule, dextran with biologically active molecules are attached through a coiled-coil structure where on α-helix of a coiled-coil dimer is coupled to dextran and the other α-helix is coupled to the biologically active molecule e.g. as a fusion protein.

[2180] 936. The composition according to item 882, wherein the one or more multimerization domains(s) comprises beads or bead-like structures having an excluded volume (e.g. polysaccharide beads, polystyrene beads, magnetic polystyrene beads, polycarbamate beads, or any other kind of beads that can be dissolved or suspended in aqueous buffer) that carry electrophilic groups (e.g. divinyl sulfone activated polysaccharide, polystyrene beads that have been functionalized with tosyl-activated esters, magnetic polystyrene beads functionalized with tosyl-activated esters), and where biologically active molecules have been covalently immobilized to these by reaction of nucleophiles comprised within the biologically active molecule with the electrophiles of the beads.

[2181] 937. The composition according to item 882, wherein the one or more multimerization domains(s) comprises one or more beads covalently or non-covalently coated with pharmamers or single biologically active molecules, through non-cleavable or cleavable linkers.

[2182] 938. The composition according to item 882, wherein the one or more multimerization domains(s) comprises one or more beads coated with streptavidin monomers, which in turn are associated with biotinylated pharmamers.

[2183] 939. The composition according to item 882, wherein the one or more multimerization domains(s) comprises one or more beads coated with streptavidin tetramers, each of which are associated with 0, 1, 2, 3, or 4 biotinylated biologically active molecules.

[2184] 940. The composition according to item 882, wherein the one or more multimerization domains(s) comprises one or more beads coated with biologically active molecules where e.g. the reactive groups of the biologically active molecules (e.g. the divinyl sulfone-activated dextran backbone) has reacted with nucleophilic groups on the bead, to form a covalent linkage between the dextran of the dextramer and the beads.

[2185] 941. The composition according to item 882, wherein the one or more multimerization domains(s) comprises one or more self-assembling multimeric structures such as trimeric, tetrameric, pentameric, hexameric or heptameric coiled-coil structures holding together 3, 4, 5, 6 or 7 biologically active molecules.

[2186] 942. The composition according to item 882, wherein the one or more multimerization domains(s) comprises several multimerization domains (e.g. streptavidin tetramers bound to biotinylated biologically active molecules) linked to another multimerization domain (e.g. the bead).

[2187] 943. The composition according to item 882, wherein the one or more multimerization domains(s) comprises any support capable of binding the biologically active molecules.

[2188] 944. The composition according to item 882, wherein the one or more multimerization domains(s) comprises glass, polystyrene, polypropylene, polyethylene, dextran, nylon, amylases, natural and modified celluloses, polyacrylamides, gabbros, and magnetite.

[2189] 945. The composition according to item 882, wherein the one or more multimerization domains(s) comprises one or more spherical supports such as one or more bead.

[2190] 946. The composition according to item 882, wherein the one or more multimerization domains(s) comprises one or more cylindrical supports such as the inside surface of a test tube, or the external surface of a rod.

[2191] 947. The composition according to item 882, wherein the one or more multimerization domains(s) comprises one or more flat supports such as a sheet, test strip, a membrane, or a plastic surface.

[2192] 948. The composition according to item 882, wherein the one or more multimerization domains(s) comprises one or more polymers, oligomers and/or non-repeating moieties.

[2193] 949. The composition according to item 882, wherein the one or more multimerization domains(s) comprises one or more polymers or oligomer moieties e.g. comprising repeat units consisting of a repeat moiety selected from alkyl (e.g., —CH₂—), substituted alkyl (e.g., —CHR—), alkenyl, substituted alkenyl, alkynyl, substituted alkynyl, phenyl, aryl, heterocyclic, amine, ether, sulfide, disulfide, hydrazine, and any of the foregoing substituted with oxygen, sulfur, sulfonyl, phosphonyl, hydroxyl, alkoxyl, amine, thiol, ether, carbonyl, carboxyl, ester, amide, alkyl, alkenyl, alkynyl, aryl, heterocyclic, as well as moieties comprising combinations thereof.

[2194] 950. The composition according to item 882, wherein the one or more multimerization domains(s) comprises one or more non-repeating multifunctional bridge moieties selected from alkyl, phenyl, aryl, alkenyl, alkynyl, heterocyclic, amine, ether, sulfide, disulfide, hydrazine, and any of the foregoing substituted with oxygen, sulfur, sulfonyl, phosphonyl, hydroxyl, alkoxyl, amine, thiol, ether, carbonyl, carboxyl, ester, amide, alkyl, alkenyl, alkynyl, aryl, heterocyclic, and moieties comprising combinations thereof.

[2195] 951. The composition according to item 882, wherein the one or more multimerization domains(s) comprises one or more oligomers (or oligomer moieties) or polymers (or polymer moieties), that are soluble or insoluble.

[2196] 952. The composition according to item 882, wherein the one or more multimerization domains(s) comprises one or more oligomers (or oligomer moieties) or polymers (or polymer moieties) comprising one or more cross-linked oligomer (or oligomer moieties) or cross-linked polymers (or polymer moieties).

[2197] 953. The composition according to item 882, wherein the one or more multimerization domains(s) comprises one or more oligomers (or oligomer moieties) or polymers (or polymer moieties) comprising one or more homopolymers and/or one or more copolymers (including polymers having two monomer-repeat-units, terpolymers and higher-order polymers), including for example random copolymer moieties and block copolymer moieties.

[2198] 954. The composition according to item 882, wherein the one or more multimerization domains(s) comprises one or more oligomers (or oligomer moieties) or polymers (or polymer moieties) comprising one or more ionic monomer moieties such as one or more anionic monomer moieties.

[2199] 955. The composition according to item 882, wherein the one or more multimerization domains(s) comprises one or more oligomers (or oligomer moieties) or polymers (or polymer moieties) comprising one or more hydrophobic and/or hydrophilic monomer moieties.

[2200] 956. The composition according to item 882, wherein the one or more multimerization domains(s) comprises from 1 to 100 coupling sites for biologically active molecules, such as from 1 to 5 coupling sites, for example from 5 to 10 coupling sites, such as from 10 to 15 coupling sites, for example from 15 to 20 coupling sites, such as from 20 to 25 coupling sites, for example from 25 to 30 coupling sites, such as from 30 to 35 coupling sites, for example from 35 to 40 coupling sites, such as from 40 to 45 coupling sites, for example from 45 to 50 coupling sites, such as from 50 to 55 coupling sites, for example from 55 to 60 coupling sites, such as from 60 to 65 coupling sites, for example from 65 to 70 coupling sites, such as from 70 to 75 coupling sites, for example from 75 to 80 coupling sites, such as from 80 to 85 coupling sites, for example from 85 to 90 coupling sites, such as from 90 to 95 coupling sites, for example from 95 to 100 coupling sites.

[2201] 957. The composition according to item 882, wherein the one or more multimerization domains(s) comprises one or more polymer moieties that are soluble or insoluble, exist as dispersed micelles or particles, such as colloidal particles or (insoluble) macroscopic beads.

[2202] 958. The composition according to item 882, wherein the one or more multimerization domains(s) comprises one or more polymer moieties that are hydrophobic, hydrophilic, amphiphilic, uncharged or non-ionic, negatively or positively charged, or a combination thereof, and can be organic or inorganic.

[2203] 959. The composition according to item 882, wherein the one or more multimerization domains(s) comprises one or more inorganic polymer moieties such as silica (e.g., multi-layered silica), diatomaceous earth, zeolite, calcium carbonate, talc, and the like.

[2204] 960. The composition according to item 882, wherein the one or more multimerization domains(s) comprises one or more water-soluble polymers including polyethylene glycol (PEG), monomethoxy-PEG, mono-(C₁-C₁₀)alkoxy-PEG, aryloxy-PEG, poly-(N-vinyl pyrrolidone)PEG, tresyl monomethoxy PEG, PEG propionaldehyde, bis-succinimidyl carbonate PEG, propylene glycol homopolymers, a polypropylene oxide/ethylene oxide co-polymer, polyoxyethylated polyols (e.g., glycerol), polyvinyl alcohol, dextran, cellulose, or other carbohydrate-based polymers.

[2205] 961. The composition according to item 882, wherein the one or more multimerization domains(s) comprises one or more polysaccharides such as materials from vegetal or animal origin, including cellulose materials, hemicellulose, alkyl cellulose, hydroxyalkyl cellulose, carboxymethylcellulose, sulfoethylcellulose, starch, xylan, amylopectine, chondroitin, hyarulonate, heparin, guar, xanthan, mannan, galactomannan, chitin, and/or chitosan.

[2206] 962. The composition according to item 882, wherein the one or more multimerization domains(s) comprises one or more multimerization domain selected from the group consisting of agarose, sepharose, resin beads, glass beads, pore-glass beads, glass particles coated with a hydrophobic polymer, chitosan-coated beads, SH beads, latex beads, spherical latex beads, allele-type beads, SPA bead, PEG-based resins, PEG-coated bead, PEG-encapsulated bead, polystyrene beads, magnetic polystyrene beads, glutathione agarose beads, magnetic bead, paramagnetic beads, protein A and/or protein G sepharose beads, activated carboxylic acid bead, macroscopic beads, microscopic beads, insoluble resin beads, silica-based resins, cellulosic resins, cross-linked agarose beads, polystyrene beads, cross-linked polyacrylamide resins, beads with iron cores, metal beads, dynabeads, Polymethylmethacrylate beads activated with NHS, streptavidin-agarose beads, polypropylene, polyethylene, dextran, nylon, amylases, natural and modified celluloses, nitrocellulose, polyacrylamides, gabbros, magnetite, polymers, oligomers, non-repeating moieties, polyethylene glycol (PEG), monomethoxy-PEG, mono-(C₁-C₁₀)alkoxy-PEG, aryloxy-PEG, poly-(N-vinyl pyrrolidone)PEG, tresyl monomethoxy PEG, PEG propionaldehyde, bis-succinimidyl carbonate PEG, polystyrene bead crosslinked with divinylbenzene, propylene glycol homopolymers, a polypropylene oxide/ethylene oxide co-polymer, polyoxyethylated polyols (e.g., glycerol), polyvinyl alcohol, dextran, aminodextran, carbohydrate-based polymers, cross-linked dextran beads, polysaccharide beads, polycarbamate beads, polyvinylcarbamate, divinyl sulfone activated polysaccharide, polystyrene beads that have been functionalized with tosyl-activated esters, magnetic polystyrene beads functionalized with tosyl-activated esters, streptavidin beads, streptavidin-monomer coated beads, streptavidin-tetramer coated beads, Streptavidin Coated Compel Magnetic beads, avidin coated beads, dextramer coated beads, divinyl sulfone-activated dextran, Carboxylate-modified bead, amine-modified beads, antibody coated beads, cellulose beads, grafted co-poly beads, poly-acrylamide beads, dimethylacrylamide beads optionally crosslinked with N—N′-bis-acryloylethylenediamine, hollow fiber membranes, fluorescent beads, collagen-agarose beads, gelatin beads, collagen-gelatin beads, collagen-fibronectin-gelatin beads, collagen beads, chitosan beads, collagen-chitosan beads, protein-based beads, hydrogel beads, hemicellulose, alkyl cellulose, hydroxyalkyl cellulose, carboxymethylcellulose, sulfoethylcellulose, starch, xylan, amylopectine, chondroitin, hyarulonate, heparin, guar, xanthan, mannan, galactomannan, chitin and chitosan.

[2207] 963. The composition according to item 882, wherein the one or more multimerization domains(s) comprises one or more multimerization domain(s) with a molecular weight of less than 1,000 Da (e.g. small molecule scaffold).

[2208] 964. The composition according to item 882, wherein the one or more multimerization domains(s) comprises one or more multimerization domain(s) with a molecular weight of between 1,000 Da and 10,000 Da (e.g. small molecule scaffold, small peptides, small polymers) such as from 1,000 Da to 2,000 Da, for example from 2,000 Da to 3,000 Da, such as from 3,000 Da to 4,000 Da, for example from 4,000 Da to 5,000 Da, such as from 5,000 Da to 6,000 Da, for example from 6,000 Da to 7,000 Da, such as from 7,000 Da to 8,000 Da, for example from 8,000 Da to 9,000 Da, such as from 9,000 Da to 10,000 Da.

[2209] 965. The composition according to item 882, wherein the one or more multimerization domains(s) comprises one or more multimerization domain(s) with a molecular weight of between 10,000 Da and 100,000 Da (e.g. Small molecule scaffold, polymers e.g. dextran, streptavidin, IgG, pentamer structure) such as from 10,000 Da to 20,000 Da, for example from 20,000 Da to 30,000 Da, such as from 30,000 Da to 40,000 Da, for example from 40,000 Da to 50,000 Da, such as from 50,000 Da to 60,000 Da, for example from 60,000 Da to 70,000 Da, such as from 70,000 Da to 80,000 Da, for example from 80,000 Da to 90,000 Da, such as from 90,000 Da to 100,000 Da.

[2210] 966. The composition according to item 882, wherein the one or more multimerization domains(s) comprises one or more multimerization domain(s) with a molecular weight of between 100,000 Da and 1,000,000 Da (e.g. Small molecule scaffold, polymers e.g. dextran, streptavidin, IgG, pentamer structure) such as from 100,000 Da to 200,000 Da, for example from 200,000 Da to 300,000 Da, such as from 300,000 Da to 400,000 Da, for example from 400,000 Da to 500,000 Da, such as from 500,000 Da to 600,000 Da, for example from 600,000 Da to 700,000 Da, such as from 700,000 Da to 800,000 Da, for example from 800,000 Da to 900,000 Da, such as from 900,000 Da to 1,000,000 Da.

[2211] 967. The composition according to item 882, wherein the one or more multimerization domains(s) comprises one or more multimerization domain(s) with a molecular weight of more than 1,000,000 Da (e.g. Small molecule scaffold, polymers e.g. dextran, streptavidin, IgG, pentamer structure, cells, liposomes, artificial lipid bi layers, polystyrene beads and other beads) such as more than 2,000,000 Da, for example more than 3,000,000 Da, such as more than 5,000,000, for example more than 10,000,000 Da.

[2212] 968. The composition according to item 882, wherein the one or more biologically active molecules and the one or more multimerization domains(s) are coupled by chemical reactions between reactive groups of the multimerization domain and reactive groups on the biologically active molecule.

[2213] 969. The composition according to item 882, wherein the one or more biologically active molecules and the one or more multimerization domains(s) are coupled by non-covalent interaction between a part of the biologically active molecule (e.g. a biotinylated peptide component) and the multimerization domain (e.g. four binding sites for biotin on the strepavidin tetrameric protein).

[2214] 970. The composition according to item 1, wherein the one or more pharmamers comprises non-covalent association of amino acid helices fused to one component of a biologically active molecule, to form e.g. a pentameric pharmamer, held together by e.g. five helices in a coiled-coil structure making up the multimerization domain.

[2215] 971. The composition according to item 882, wherein the one or more biologically active molecules and the one or more multimerization domains(s) are coupled by one or more chemical reactions

[2216] 972. The composition according to item 971, wherein the one or more chemical reactions comprises nucleophilic substitution by activation of electrophiles (e.g. acylation such as amide formation, pyrazolone formation, isoxazolone formation; alkylation; vinylation; disulfide formation).

[2217] 973. The composition according to item 971, wherein the one or more chemical reactions comprises addition to carbon-hetero multiple bonds (e.g. alkene formation by reaction of phosphonates with aldehydes or ketones; arylation; alkylation of arenes/hetarenes by reaction with alkyl boronates or enolethers).

[2218] 974. The composition according to item 971, wherein the one or more chemical reactions comprises nucleophilic substitution using activation of nucleophiles (e.g. condensations; alkylation of aliphatic halides or tosylates with enolethers or enamines).

[2219] 975. The composition according to item 971, wherein the one or more chemical reactions comprises cycloadditions.

[2220] 976. The composition according to item 971, wherein the one or more biologically active molecules and the one or more multimerization domains(s) are coupled one or more non-covalent interaction(s).

[2221] 977. The composition according to item 976, wherein the one or more non-covalent interaction(s) comprises streptavidin/biotin.

[2222] 978. The composition according to item 976, wherein the one or more non-covalent interaction(s) comprises avidin/biotin.

[2223] 979. The composition according to item 976, wherein the one or more non-covalent interaction(s) comprises antibody/antigen.

[2224] 980. The composition according to item 976, wherein the one or more non-covalent interaction(s) comprises DNA/DNA.

[2225] 981. The composition according to item 976, wherein the one or more non-covalent interaction(s) comprises DNA/PNA.

[2226] 982. The composition according to item 976, wherein the one or more non-covalent interaction(s) comprises DNA/RNA.

[2227] 983. The composition according to item 976, wherein the one or more non-covalent interaction(s) comprises PNA/PNA.

[2228] 984. The composition according to item 976, wherein the one or more non-covalent interaction(s) comprises LNA/DNA.

[2229] 985. The composition according to item 976, wherein the one or more non-covalent interaction(s) comprises leucine zipper e.g. Fos/Jun.

[2230] 986. The composition according to item 976, wherein the one or more non-covalent interaction(s) comprises IgG dimeric protein.

[2231] 987. The composition according to item 976, wherein the one or more non-covalent interaction(s) comprises IgM multivalent protein.

[2232] 988. The composition according to item 976, wherein the one or more non-covalent interaction(s) comprises acid/base coiled-coil helices.

[2233] 989. The composition according to item 976, wherein the one or more non-covalent interaction(s) comprises chelate/metal ion-bound chelate.

[2234] 990. The composition according to item 976, wherein the one or more non-covalent interaction(s) comprises streptavidin (SA) and avidin and derivatives thereof.

[2235] 991. The composition according to item 976, wherein the one or more non-covalent interaction(s) comprises biotin.

[2236] 992. The composition according to item 976, wherein the one or more non-covalent interaction(s) comprises immunoglobulins.

[2237] 993. The composition according to item 976, wherein the one or more non-covalent interaction(s) comprises antibodies (monoclonal, polyclonal, and recombinant).

[2238] 994. The composition according to item 976, wherein the one or more non-covalent interaction(s) comprises antibody fragments and derivatives thereof.

[2239] 995. The composition according to item 976, wherein the one or more non-covalent interaction(s) comprises leucine zipper domain of AP-1 (jun and fos).

[2240] 996. The composition according to item 976, wherein the one or more non-covalent interaction(s) comprises hexa-his (metal chelate moiety).

[2241] 997. The composition according to item 976, wherein the one or more non-covalent interaction(s) comprises hexa-hat GST (glutathione S-transferase) glutathione affinity.

[2242] 998. The composition according to item 976, wherein the one or more non-covalent interaction(s) comprises Calmodulin-binding peptide (CBP).

[2243] 999. The composition according to item 976, wherein the one or more non-covalent interaction(s) comprises Strep-tag.

[2244] 1000. The composition according to item 976, wherein the one or more non-covalent interaction(s) comprises Cellulose Binding Domain.

[2245] 1001. The composition according to item 976, wherein the one or more non-covalent interaction(s) comprises one or more of the molecules selected from the group consisting of Maltose Binding Protein, S-Peptide Tag, Chitin Binding Tag, Immuno-reactive Epitopes, Epitope Tags, E2Tag, HA Epitope Tag, Myc Epitope, FLAG Epitope, AU1 and AU5 Epitopes, Glu-Glu Epitope, KT3 Epitope, IRS Epitope, Btag Epitope, Protein Kinase-C Epitope, VSV Epitope, lectins that mediate binding to a diversity of compounds, including carbohydrates, lipids and proteins, e.g. Con A (Canavalia ensiformis) or WGA (wheat germ agglutinin) and tetranectin or Protein A or G (antibody affinity).

[2246] 1002. The composition according to item 1, wherein the composition comprises one or more living virulent organism(s).

[2247] 1003. The composition according to item 1002, wherein the one or more living virulent organism(s) comprises one or more fully virulent organism(s).

[2248] 1004. The composition according to item 1002, wherein the one or more living virulent organism(s) comprises one or more partly virulent organism(s).

[2249] 1005. The composition according to item 1002, wherein the one or more living virulent organism(s) comprises one or more partly virulent organism(s) and one or more fully virulent organism(s).

[2250] 1006. The composition according to item 1004, wherein the one or more partly virulent organism(s) comprises one or more live attenuated microorganism(s).

[2251] 1007. The composition according to item 1006, wherein the one or more live attenuated microorganism(s) are modified by physical means.

[2252] 1008. The composition according to item 1007, wherein the physical means comprises heat.

[2253] 1009. The composition according to item 1006, wherein the one or more live attenuated microorganism(s) are modified by chemical means.

[2254] 1010. The composition according to item 1009, wherein the chemical means comprises one or more chemical(s).

[2255] 1011. The composition according to item 1006, wherein the one or more live attenuated microorganism(s) are modified by genetic manipulation.

[2256] 1012. The composition according to item 1011, wherein the genetic manipulation comprises generation of a recombinant bacteria missing virulence factors.

[2257] 1013. The composition according to item 1006, wherein the one or more live attenuated microorganism(s) are cultured under conditions that disable their virulent properties.

[2258] 1014. The composition according to item 1, wherein the composition comprises one or more killed organism(s).

[2259] 1015. The composition according to item 1014, wherein the one or more killed organism(s) comprises one or more physically killed organism(s).

[2260] 1016. The composition according to item 1015, wherein the one or more physically killed organism(s) is killed by heat.

[2261] 1017. The composition according to item 1015, wherein the one or more physically killed organism(s) is killed by irradiation.

[2262] 1018. The composition according to item 1014, wherein the one or more killed organism(s) comprises one or more chemically killed organism(s).

[2263] 1019. The composition according to item 1018, wherein the one or more chemically killed organism(s) are killed by phenol.

[2264] 1020. The composition according to item 1018, wherein the one or more chemically killed organism(s) are killed by formaldehyde.

[2265] 1021. The composition according to item 1, wherein the composition comprises one or more fragments of one or more microorganism(s).

[2266] 1022. The composition according to item 1021, wherein the one or more fragments of one or more microorganism(s) are isolated directly from the one or more microorganism(s).

[2267] 1023. The composition according to item 1, wherein the composition comprises early HBV vaccine.

[2268] 1024. The composition according to item 1021, wherein the one or more fragments of one or more microorganism(s) are produced by recombinant DNA technology.

[2269] 1025. The composition according to item 1, wherein the composition comprises HPV vaccine.

[2270] 1026. The composition according to item 1, wherein the composition comprises one or more macromolecule(s).

[2271] 1027. The composition according to item 1026, wherein the one or more macromolecule(s) comprises one or more naturally occurring protein(s).

[2272] 1028. The composition according to item 1027, wherein the one or more naturally occurring protein(s) are isolated and used directly.

[2273] 1029. The composition according to item 1027, wherein the one or more naturally occurring protein(s) that are isolated and used directly comprises one or more cytokine(s).

[2274] 1030. The composition according to item 1027, wherein the one or more naturally occurring protein(s) that are isolated and used directly comprises one or more interleukine(s).

[2275] 1031. The composition according to item 1027, wherein the one or more naturally occurring protein(s) that are isolated and used directly comprises one or more interferone(s).

[2276] 1032. The composition according to item 1027, wherein the one or more naturally occurring protein(s) that are isolated and used directly comprises one or more antibodies(s).

[2277] 1033. The composition according to item 1032, wherein the one or more antibodies(s) comprises one or more monoclonal antibodies.

[2278] 1034. The composition according to item 1032, wherein the one or more antibodies(s) comprises one or more polyclonal antibodies.

[2279] 1035. The composition according to item 1027, wherein the one or more naturally occurring protein(s) are isolated and modified.

[2280] 1036. The composition according to item 1035, wherein the one or more naturally occurring protein(s) that are isolated and modified comprises one or more modified toxin(s).

[2281] 1037. The composition according to item 1036, wherein the one or more modified toxin(s) are chemically modified.

[2282] 1038. The composition according to item 1036, wherein the one or more modified toxin(s) are physically modified.

[2283] 1039. The composition according to item 1035, wherein the one or more naturally occurring protein(s) that are isolated and modified comprises one or more modified antibodies.

[2284] 1040. The composition according to item 1039, wherein the one or more modified antibodies are chemically modified.

[2285] 1041. The composition according to item 1039, wherein the one or more modified antibodies are digested into one or more fragment(s).

[2286] 1042. The composition according to item 1041, wherein the one or more fragment(s) comprises one or more Fab fragment(s).

[2287] 1043. The composition according to item 1026, wherein the one or more macromolecule(s) comprises one or more recombinant protein(s).

[2288] 1044. The composition according to item 1043, wherein the one or more recombinant protein(s) comprises one or more antibodies.

[2289] 1045. The composition according to item 1044, wherein the one or more antibodies comprises one or more full length antibodies.

[2290] 1046. The composition according to item 1044, wherein the one or more antibodies comprises one or more Fab fragments.

[2291] 1047. The composition according to item 1044, wherein the one or more antibodies comprises one or more scFv fragments.

[2292] 1048. The composition according to item 1044, wherein the one or more antibodies comprises one or more antibody-like scaffolds.

[2293] 1049. The composition according to item 1044 to 1048, wherein the one or more antibodies are natural in sequence.

[2294] 1050. The composition according to item 1044 to 1048, wherein the one or more antibodies are artificial in sequence.

[2295] 1051. The composition according to item 1050, wherein the one or more antibodies that are artificial in sequence have one or more amino acid substitutions in the binding site.

[2296] 1052. The composition according to item 1043, wherein the one or more recombinant protein(s) comprises one or more MHC molecule(s).

[2297] 1053. The composition according to item 1052, wherein the one or more MHC molecule(s) are one or more MHC I molecules.

[2298] 1054. The composition according to item 1053, wherein the one or more MHC I molecules consists of full length and/or truncated heavy chain, full length and/or truncated beta2m and peptide.

[2299] 1055. The composition according to item 1053, wherein the one or more MHC I molecules consists of full length and/or truncated heavy chain and full length and/or truncated beta2m.

[2300] 1056. The composition according to item 1053, wherein the one or more MHC I molecules consists of full length and/or truncated heavy chain and peptide.

[2301] 1057. The composition according to item 1053, wherein the one or more MHC I molecules consists of full length and/or truncated heavy chain.

[2302] 1058. The composition according to item 1052, wherein the one or more MHC molecule(s) are one or more MHC II molecules.

[2303] 1059. The composition according to item 1058, wherein the one or more MHC II molecules consists of full length and/or truncated alpha chain and full length and/or truncated beta chain and peptide.

[2304] 1060. The composition according to item 1058, wherein the one or more MHC II molecules consists of full length and/or truncated alpha chain and full length and/or truncated beta chain.

[2305] 1061. The composition according to item 1043, wherein the one or more recombinant protein(s) comprises one or more cytokine(s).

[2306] 1062. The composition according to item 1061, wherein the one or more cytokine(s) are full length.

[2307] 1063. The composition according to item 1061, wherein the one or more cytokine(s) are truncated.

[2308] 1064. The composition according to item 1043, wherein the one or more recombinant protein(s) comprises one or more interleukine(s).

[2309] 1065. The composition according to item 1064, wherein the one or more interleukine(s) are full length.

[2310] 1066. The composition according to item 1064, wherein the one or more interleukine(s) are truncated.

[2311] 1067. The composition according to item 1064, wherein the one or more recombinant protein(s) comprises one or more interferone(s).

[2312] 1068. The composition according to item 1067, wherein the one or more interferone(s) are full length.

[2313] 1069. The composition according to item 1067, wherein the one or more interferone(s) are truncated.

[2314] 1070. The composition according to item 1026, wherein the one or more macromolecule(s) comprises one or more nucleic acid(s).

[2315] 1071. The composition according to item 1070, wherein the one or more nucleic acid(s) comprises DNA.

[2316] 1072. The composition according to item 1071, wherein the DNA encodes one or more protein(s).

[2317] 1073. The composition according to item 1071, wherein the DNA does not encode one or more protein(s).

[2318] 1074. The composition according to item 1070, wherein the one or more nucleic acid(s) comprises RNA.

[2319] 1075. The composition according to item 1074, wherein the RNA comprises one or more ribozyme(s).

[2320] 1076. The composition according to item 1074, wherein the RNA comprises antisense.

[2321] 1077. The composition according to item 1074, wherein the RNA comprises silencing RNA.

[2322] 1078. The composition according to item 1070, wherein the one or more nucleic acid(s) comprises LNA.

[2323] 1079. The composition according to item 1070, wherein the one or more nucleic acid(s) comprises PNA.

[2324] 1080. The composition according to item 1026, wherein the one or more macromolecule(s) comprises one or more carbohydrate(s).

[2325] 1081. The composition according to item 1080, wherein the one or more carbohydrate(s) comprises one or more pure carbohydrates.

[2326] 1082. The composition according to item 1081, wherein the one or more pure carbohydrates comprises one or more monosaccharides.

[2327] 1083. The composition according to item 1082, wherein the one or more monosaccharides are modified.

[2328] 1084. The composition according to item 1081, wherein the one or more pure carbohydrates comprises one or more disaccharides.

[2329] 1085. The composition according to item 1084, wherein the one or more disaccharides are modified.

[2330] 1086. The composition according to item 1081, wherein the one or more pure carbohydrates comprises one or more polysaccharides.

[2331] 1087. The composition according to item 1086, wherein the one or more polysaccharides are modified.

[2332] 1088. The composition according to item 1080, wherein the one or more carbohydrate(s) comprises one or more glycoprotein(s).

[2333] 1089. The composition according to item 1080, wherein the one or more carbohydrate(s) comprises one or more glycolipid(s).

[2334] 1090. The composition according to item 1026, wherein the one or more macromolecule(s) are not part of a complex.

[2335] 1091. The composition according to item 1026, wherein the one or more macromolecule(s) are part of one or more complex(es).

[2336] 1092. The composition according to item 1091, wherein the one or more complex(es) comprises one or more polymer backbone(s).

[2337] 1093. The composition according to item 1091, wherein the one or more complex(es) is attached to one or more solid support(s).

[2338] 1094. The composition according to item 1091, wherein the complex is attached to one or more bead(s).

[2339] 1095. The composition according to item 1, wherein the composition is a cell-based vaccine.

[2340] 1096. The composition according to item 1095, wherein the cell based vaccine comprises one or more naturally occurring cell(s).

[2341] 1097. The composition according to item 1096, wherein the one or more naturally occurring cell(s) are isolated and amplified (by proliferation).

[2342] 1098. The composition according to item 1096, wherein the one or more naturally occurring cell(s) are isolated and modified.

[2343] 1099. The composition according to item 1098, wherein the one or more naturally occurring cell(s) that are isolated are modified to display one or more specific MHC complex(es).

[2344] 1100. The composition according to item 1099, wherein the one or more naturally occurring cell(s) that are isolated and modified to display one or more specific MHC complex(es) are incubated with one or more peptide(s).

[2345] 1101. The composition according to item 1099, wherein the one or more naturally occurring cell(s) that are isolated and modified to display one or more specific MHC complex(es) are fused to one or more other cells.

[2346] 1102. The composition according to item 1101, wherein the one or more other cells comprise one or more hybridoma cell(s).

[2347] 1103. The composition according to item 1099, wherein the one or more naturally occurring cell(s) that are isolated and modified to display one or more specific MHC complex(es) are obtained by one or more transfection(s).

[2348] 1104. The composition according to item 1103, wherein the one or more transfection(s) comprises supercoiled plasmid DNA.

[2349] 1105. The composition according to item 1103, wherein the one or more transfection(s) comprises siRNA.

[2350] 1106. The composition according to item 1103, wherein the one or more transfection(s) comprises protein.

[2351] 1107. The composition according to item 1099, wherein the one or more naturally occurring cell(s) that are isolated and modified by one or more chemical modification step(s).

[2352] 1108. The composition according to item 1095, wherein the one or more cell based vaccine(s) comprises one or more non-naturally occurring cell(s).

[2353] 1109. The composition according to item 1108, wherein the one or more cell based vaccine(s) comprises one or more non-naturally occurring cell(s) that are chemically modified.

[2354] 1110. The composition according to item 1108, wherein the one or more cell based vaccine(s) comprises one or more non-naturally occurring cell(s) that are genetically modified.

[2355] 1111. The composition according to item 1, wherein the composition is a liposome/micelle-based vaccine.

[2356] 1112. The composition according to item 1, wherein the composition is a nanocluster-based vaccine.

[2357] 1113. The composition according to item 1, wherein the composition comprises one or more vaccine adjuvant(s).

[2358] 1114. The composition according to item 1113, wherein the one or more vaccine adjuvant(s) increases or otherwise modifies the immune response to said vaccine.

[2359] 1115. The composition according to item 1113, wherein the one or more vaccine adjuvant(s) elicit an earlier and/or more potent immune response to said vaccine.

[2360] 1116. The composition according to item 1113, wherein the one or more vaccine adjuvant(s) elicit a prolonged and/or more potent immune response to said vaccine.

[2361] 1117. The composition according to item 1113, wherein the one or more vaccine adjuvant(s) results in increased humoral immunity to said vaccine.

[2362] 1118. The composition according to item 1113, wherein the one or more vaccine adjuvant(s) results in induction of the complement pathway.

[2363] 1119. The composition according to item 1113, wherein the one or more vaccine adjuvant(s) results in increased cell mediated immunity to said vaccine.

[2364] 1120. The composition according to item 1113, wherein the one or more vaccine adjuvant(s) comprises one or more antigenic determinant(s).

[2365] 1121. The composition according to item 1113, wherein the one or more vaccine adjuvant(s) comprises one or more haptenic determinant(s).

[2366] 1122. The composition according to item 1113, wherein the one or more vaccine adjuvant(s) comprises one or more mineral adjuvant(s).

[2367] 1123. The composition according to item 1122, wherein the one or more mineral adjuvant(s) comprises one or more aluminium compounds such as one or more aluminium salt(s).

[2368] 1124. The composition according to item 1122, wherein the one or more mineral adjuvant(s) comprises aluminium hydroxide.

[2369] 1125. The composition according to item 1113, wherein the one or more vaccine adjuvant(s) comprises one or more bacterial adjuvant(s).

[2370] 1126. The composition according to item 1125, wherein one or more bacterial adjuvant(s) are purified.

[2371] 1127. The composition according to item 1125, wherein one or more bacterial adjuvant(s) are chemically purified.

[2372] 1128. The composition according to item 1125, wherein one or more bacterial adjuvant(s) are synthesized.

[2373] 1129. The composition according to item 1125, wherein one or more bacterial adjuvant(s) comprises muramyl dipeptides.

[2374] 1130. The composition according to item 1125, wherein one or more bacterial adjuvant(s) comprises lipid A.

[2375] 1131. The composition according to item 1125, wherein one or more bacterial adjuvant(s) comprises Interleukin 1.

[2376] 1132. The composition according to item 1125, wherein one or more bacterial adjuvant(s) comprises Interleukin 2.

[2377] 1133. The composition according to item 1125, wherein one or more bacterial adjuvant(s) comprises one or more cloned host mediator(s).

[2378] 1134. The composition according to item 1125, wherein one or more bacterial adjuvant(s) comprises Bordetella pertussis.

[2379] 1135. The composition according to item 1125, wherein one or more bacterial adjuvant(s) comprises one or more lipopolysaccharide(s).

[2380] 1136. The composition according to item 1125, wherein one or more bacterial adjuvant(s) comprises Freund's Complete Adjuvant (FCA).

[2381] 1137. The composition according to item 1125, wherein one or more bacterial adjuvant(s) comprises Titermax.

[2382] 1138. The composition according to item 1125, wherein one or more bacterial adjuvant(s) comprises ISCOMS.

[2383] 1139. The composition according to item 1125, wherein one or more bacterial adjuvant(s) comprises Quil A.

[2384] 1140. The composition according to item 1125, wherein one or more bacterial adjuvant(s) comprises ALUN.

[2385] 1141. The composition according to item 1125, wherein one or more bacterial adjuvant(s) comprises one or more Lipid A derivatives.

[2386] 1142. The composition according to item 1125, wherein one or more bacterial adjuvant(s) comprises one or more choleratoxin derivatives.

[2387] 1143. The composition according to item 1125, wherein one or more bacterial adjuvant(s) comprises one or more HSP derivatives.

[2388] 1144. The composition according to item 1125, wherein one or more bacterial adjuvant(s) comprises one or more LPS derivatives.

[2389] 1145. The composition according to item 1125, wherein one or more bacterial adjuvant(s) comprises one or more synthetic peptide matrixes.

[2390] 1146. The composition according to item 1125, wherein one or more bacterial adjuvant(s) comprises GMDP.

[2391] 1147. The composition according to item 1125, wherein one or more bacterial adjuvant(s) comprises one or more lipopolysaccharide(s) and/or derivates thereof.

[2392] 1148. The composition according to item 1125, wherein one or more bacterial adjuvant(s) comprises one or more lipopolysaccharide(s) and/or derivates thereof in combination with one or more liposome(s).

[2393] 1149. The composition according to item 1125, wherein one or more bacterial adjuvant(s) comprises one or more lipopolysaccharide(s) and/or derivates thereof in combination with one or more lipid emulsion(s).

[2394] 1150. The composition according to item 1113, wherein the one or more vaccine adjuvant(s) comprises one or more plant adjuvant(s).

[2395] 1151. The composition according to item 1150, wherein the one or more plant adjuvant(s) comprises saponin.

[2396] 1152. The composition according to item 1113, wherein the one or more vaccine adjuvant(s) comprises one or more animal products adjuvant(s).

[2397] 1153. The composition according to item 1152, wherein the one or more animal products adjuvant(s) comprises chitin.

[2398] 1154. The composition according to item 1113, wherein the one or more vaccine adjuvant(s) comprises one or more synthetic adjuvant(s).

[2399] 1155. The composition according to item 1113, wherein the one or more vaccine adjuvant(s) comprises one or more host adjuvant(s).

[2400] 1156. The composition according to item 1113, wherein the one or more vaccine adjuvant(s) comprises one or more antigens precipitated with aluminum salt(s).

[2401] 1157. The composition according to item 1113, wherein the one or more vaccine adjuvant(s) comprises one or more antigens mixed with or adsorbed to performed aluminum compounds.

[2402] 1158. The composition according to item 1113, wherein the one or more vaccine adjuvant(s) comprises one or more oil emulsion(s).

[2403] 1159. The composition according to item 1113, wherein the one or more vaccine adjuvant(s) comprises one or more liposome(s).

[2404] 1160. The composition according to item 1113, wherein the one or more vaccine adjuvant(s) comprises one or more synthetic polymer(s).

[2405] 1161. The composition according to item 1113, wherein the one or more vaccine adjuvant(s) act through antigen localization and delivery.

[2406] 1162. The composition according to item 1113, wherein the one or more vaccine adjuvant(s) act by direct effects on cells making up the immune system, such as macrophages and lymphocytes.

[2407] 1163. The composition according to item 1113, wherein the one or more vaccine adjuvant(s) act by creation of an antigen depot.

[2408] 1164. The composition according to item 1113, wherein the one or more vaccine adjuvant(s) comprises Alhydrogel.

[2409] 1165. The composition according to item 1113, wherein the one or more vaccine adjuvant(s) comprises MF59 and/or the proprietary Montanide ISA720.

[2410] 1166. The composition according to item 1113, wherein the one or more vaccine adjuvant(s) selected from the group consisting of AlK(SO₄)₂, AlNa(SO₄)₂, AlNH₄(SO₄), silica, alum, Al(OH)₃, Ca₃(PO₄)₂, kaolin, carbon, aluminum hydroxide, muramyl dipeptides, N-acetyl-muramyl-L-threonyl-D-isoglutamine (thr-DMP), N-acetyl-nornuramyl-L-alanyl-D-isoglutamine (CGP 11687, also referred to as nor-MDP), N-acetylmuramyul-L-alanyl-D-isoglutaminyl-L-alanine-2-(1′2′-dipalmitoyl-sn-glycero-3-hydroxphosphoryloxy)-ethylamine (CGP 19835A, also referred to as MTP-PE), RIBI (MPL+TDM+CWS) in a 2% squalene/Tween-80® emulsion, lipopolysaccharides and its various derivatives, including lipid A, Freund's Complete Adjuvant (FCA), Freund's Incomplete Adjuvants, Merck Adjuvant 65, polynucleotides (for example, poly IC and poly AU acids), wax D from Mycobacterium, tuberculosis, substances found in Corynebacterium parvum, Bordetella pertussis, and members of the genus Brucella, liposomes or other lipid emulsions, Titermax, ISCOMS, Quil A, ALUN (see U.S. Pat. Nos. 58,767 and 5,554,372), Lipid A derivatives, choleratoxin derivatives, HSP derivatives, LPS derivatives, synthetic peptide matrixes or GMDP, Interleukin 1, Interleukin 2, Montanide ISA-51 and QS-21, Freund's complete or incomplete adjuvant, and killed B. pertussis organisms, used e.g. in combination with alum precipitated antigen.

[2411] 1167. The composition according to any of items 1 to 1166, wherein the composition comprises at least one biologically active molecule such as from 1 to 3, 1 to 4, 1 to 5, 1 to 6, 1 to 7, 1 to 8, 1 to 9, 1 to 10, or 1 to more than 10; 2 to 3, 2 to 4, 2 to 5, 2 to 6, 2 to 7, 2 to 8, 2 to 9, 2 to 10, or 2 to more than 10; 3 to 4, 3 to 5, 3 to 6, 3 to 7, 3 to 8, 3 to 9, 3 to 10, or 3 to more than 10; 4 to 5, 4 to 6, 4 to 7, 4 to 8, 4 to 9, 4 to 10, or 4 to more than 10; 5 to 6, 5 to 7, 5 to 8, 5 to 9, 5 to 10, or 5 to more than 10; 6 to 7, 6 to 8, 6 to 9, 6 to 10, or 6 to more than 10; 7 to 8, 7 to 9, 7 to 10, or 7 to more than 10; 8 to 9, 8 to 10, or 8 to more than 10; 9 to 10, or 9 to more than 10 different biologically active molecules.

[2412] 1168. The composition according to any of items 1 to 1166, wherein the composition comprises two different biologically active molecules termed A and B, wherein the ratio of A:B can be selected from the group consisting of 1:1, 1:2, 1:3, 1:4, 1:5, 1:10, 2:3, and 3:5.

[2413] 1169. The composition according to any of items 1 to 1166, wherein the composition comprises three different biologically active molecules termed A, B and C, wherein the ratio of A:B:C can be selected from the group consisting of 1:1:1, 1:2:1, 1:3:1, 1:4:1, 1:5:1, 1:10:1, 2:1:1, 2:1:2, 2:3:2, and 3:5:8.

[2414] 1170. The composition according to any of items 1 to 1166, wherein the composition comprises five different biologically active molecules termed A, B, C, D, and E, wherein the ratio of A:B:C:D:E can be selected from the group consisting of 1:1:1:1:1, 1:1:1:1:2, 1:1:1:2:2, 1:2:2:2:2, 2:4:3:6:5, 4:6:8:1:1, and 10:1:2:5:2.

[2415] 1171. A method of making the composition according to item 1-1170.

[2416] 1172. A method for vaccination comprising administration to an individual in need thereof an effective amount of the composition according to item 1-1170.

[2417] 1173. The method for vaccination according to item 1172, wherein each dosage unit of said composition comprises in the range of 0.01 to 1 μg, such as in the range of 0.05 to 1 μg, for example in the range of 0.1 to 1 μg, such as in the range of 0.05 to 1 μg, for example in the range of 0.1 to 1 μg, such as in the range of 0.05 to 0.8 μg, for example in the range of 0.05 to 0.6 μg, such as in the range of 0.05 to 0.4 μg, for example in the range of 0.05 to 0.2 μg, such as in the range of 0.1 to 0.8 μg, for example in the range of 0.1 to 0.6 μg, such as in the range of 0.1 to 0.5 μg, for example in the range of 0.1 to 0.4 μg, such as in the range of 0.1 to 0.3 μg, for example in the range of 0.1 to 0.2 μg of pharmamer and/or peptide.

[2418] 1174. The method for vaccination according to item 1172, wherein the daily dosage of the composition comprises pharmamer in the range from 0.001 to 1,000 mg per adult human/per day, such as from 0.001 to 0.005 mg per adult human/per day, for example from 0.005 to 0.01 mg per adult human/per day, such as from 0.01 to 0.05 mg per adult human/per day, for example from 0.05 to 0.1 mg per adult human/per day, such as from 0.1 to 0.5 mg per adult human/per day, for example from 0.5 to 1 mg per adult human/per day, such as from 1 to 5 mg per adult human/per day, for example from 5 to 10 mg per adult human/per day, such as from 10 to 50 mg per adult human/per day, for example from 50 to 100 mg per adult human/per day, such as from 100 to 500 mg per adult human/per day, for example from 500 to 1000 mg per adult human/per day.

[2419] 1175. The method for vaccination according to item 1172, wherein the vaccination comprises oral administration of scored or unscored tablets containing e.g. 0.01, 0.05, 0.1, 0.5, 1.0, 2.5, 5.0, 10.0, 15.0, 25.0, or 50.0 milligrams of the active ingredient for the symptomatic adjustment of the dosage to the patient to be treated.

[2420] 1176. The method for vaccination according to item 1172, wherein the composition is administered at a dosage level of from about 0.0001 mg/kg to about 100 mg/kg of body weight per day, such as from about 0.0001 mg/kg to about 0.0005 mg/kg of body weight per day, for example from about 0.0005 mg/kg to about 0.001 mg/kg of body weight per day, such as from about 0.001 mg/kg to about 0.005 mg/kg of body weight per day, for example from about 0.005 mg/kg to about 0.01 mg/kg of body weight per day, such as from about 0.01 mg/kg to about 0.05 mg/kg of body weight per day, for example from about 0.05 mg/kg to about 0.1 mg/kg of body weight per day, such as from about 0.1 mg/kg to about 0.5 mg/kg of body weight per day, for example from about 0.5 mg/kg to about 1 mg/kg of body weight per day, such as from about 1 mg/kg to about 5 mg/kg of body weight per day, for example from about 5 mg/kg to about 10 mg/kg of body weight per day, such as from about 10 mg/kg to about 50 mg/kg of body weight per day, for example from about 50 mg/kg to about 100 mg/kg of body weight per day.

[2421] 1177. The method for vaccination according to item 1172, wherein the composition is administered at a dosage level comprising of from about 0.0001 mg/kg to about 100 mg/kg of body weight per day, such as from about 0.0001 mg/kg to about 0.0005 mg/kg of body weight per day, for example from about 0.0005 mg/kg to about 0.001 mg/kg of body weight per day, such as from about 0.001 mg/kg to about 0.005 mg/kg of body weight per day, for example from about 0.005 mg/kg to about 0.01 mg/kg of body weight per day, such as from about 0.01 mg/kg to about 0.05 mg/kg of body weight per day, for example from about 0.05 mg/kg to about 0.1 mg/kg of body weight per day, such as from about 0.1 mg/kg to about 0.5 mg/kg of body weight per day, for example from about 0.5 mg/kg to about 1 mg/kg of body weight per day, such as from about 1 mg/kg to about 5 mg/kg of body weight per day, for example from about 5 mg/kg to about 10 mg/kg of body weight per day, such as from about 10 mg/kg to about 50 mg/kg of body weight per day, for example from about 50 mg/kg to about 100 mg/kg of body weight per day of pharmamer.

[2422] 1178. The method for vaccination according to item 1172, wherein the composition is administered at a dosage level comprising of from about 0.0001 mg/kg to about 100 mg/kg of body weight per day, such as from about 0.0001 mg/kg to about 0.0005 mg/kg of body weight per day, for example from about 0.0005 mg/kg to about 0.001 mg/kg of body weight per day, such as from about 0.001 mg/kg to about 0.005 mg/kg of body weight per day, for example from about 0.005 mg/kg to about 0.01 mg/kg of body weight per day, such as from about 0.01 mg/kg to about 0.05 mg/kg of body weight per day, for example from about 0.05 mg/kg to about 0.1 mg/kg of body weight per day, such as from about 0.1 mg/kg to about 0.5 mg/kg of body weight per day, for example from about 0.5 mg/kg to about 1 mg/kg of body weight per day, such as from about 1 mg/kg to about 5 mg/kg of body weight per day, for example from about 5 mg/kg to about 10 mg/kg of body weight per day, such as from about 10 mg/kg to about 50 mg/kg of body weight per day, for example from about 50 mg/kg to about 100 mg/kg of body weight per day of peptide(s).

[2423] 1179. The method for vaccination according to item 1172, wherein the composition is administered at a dosage level comprising of from about 0.0001 mg/kg to about 100 mg/kg of body weight per day, such as from about 0.0001 mg/kg to about 0.0005 mg/kg of body weight per day, for example from about 0.0005 mg/kg to about 0.001 mg/kg of body weight per day, such as from about 0.001 mg/kg to about 0.005 mg/kg of body weight per day, for example from about 0.005 mg/kg to about 0.01 mg/kg of body weight per day, such as from about 0.01 mg/kg to about 0.05 mg/kg of body weight per day, for example from about 0.05 mg/kg to about 0.1 mg/kg of body weight per day, such as from about 0.1 mg/kg to about 0.5 mg/kg of body weight per day, for example from about 0.5 mg/kg to about 1 mg/kg of body weight per day, such as from about 1 mg/kg to about 5 mg/kg of body weight per day, for example from about 5 mg/kg to about 10 mg/kg of body weight per day, such as from about 10 mg/kg to about 50 mg/kg of body weight per day, for example from about 50 mg/kg to about 100 mg/kg of body weight per day of biologically active molecule.

[2424] 1180. The method for vaccination according to item 1172, wherein the composition is administered at a dosage level comprising of from about 0.0001 mg/kg to about 100 mg/kg of body weight per day, such as from about 0.0001 mg/kg to about 0.0005 mg/kg of body weight per day, for example from about 0.0005 mg/kg to about 0.001 mg/kg of body weight per day, such as from about 0.001 mg/kg to about 0.005 mg/kg of body weight per day, for example from about 0.005 mg/kg to about 0.01 mg/kg of body weight per day, such as from about 0.01 mg/kg to about 0.05 mg/kg of body weight per day, for example from about 0.05 mg/kg to about 0.1 mg/kg of body weight per day, such as from about 0.1 mg/kg to about 0.5 mg/kg of body weight per day, for example from about 0.5 mg/kg to about 1 mg/kg of body weight per day, such as from about 1 mg/kg to about 5 mg/kg of body weight per day, for example from about 5 mg/kg to about 10 mg/kg of body weight per day, such as from about 10 mg/kg to about 50 mg/kg of body weight per day, for example from about 50 mg/kg to about 100 mg/kg of body weight per day of adjuvants.

[2425] 1181. The method for vaccination according to item 1172, wherein the individual in need thereof is a mammal.

[2426] 1182. The method for vaccination according to item 1172, wherein the individual in need thereof is a human being.

[2427] 1183. The method for vaccination according to item 1172, wherein the individual in need thereof is a newborn.

[2428] 1184. The method for vaccination according to item 1172, wherein the individual in need thereof is a child.

[2429] 1185. The method for vaccination according to item 1172, wherein the individual in need thereof is an adult.

[2430] 1186. The method for vaccination according to item 1172, wherein the individual in need thereof is a woman.

[2431] 1187. The method for vaccination according to item 1172, wherein the individual in need thereof is a man.

[2432] 1188. The method for vaccination according to item 1172, wherein the individual in need thereof is of any age such as from newborn to 120 years old, for example from 0 to 6 months, such as from 6 to 12 months, for example from 1 to 5 years, such as from 5 to 10 years, for example from 10 to 15 years, such as from 15 to 20 years, for example from 20 to 25 years, such as from 25 to 30 years, for example from 30 to 35 years, such as from 35 to 40 years, for example from 40 to 45 years, such as from 45 to 50 years, for example from 50 to 60 years, such as from 60 to 70 years, for example from 70 to 80 years, such as from 80 to 90 years, for example from 90 to 100 years, such as from 100 to 110 years, for example from 110 to 120 years.

[2433] 1189. The method for vaccination according to item 1172, wherein the individual in need thereof is of any race such as a Caucasian, a black person, an East Asian person, a person of Mongoloid race, a person of Ethiopian race, a person of Negroid race, a person of American Indian race, or a person of Malayan race.

[2434] 1190. The method for vaccination according to item 1172, wherein the individual in need thereof is healthy.

[2435] 1191. The method for vaccination according to item 1172, wherein the individual in need thereof is ill.

[2436] 1192. The method for vaccination according to item 1172, wherein the individual in need thereof is diagnosed with one or more diseases.

[2437] 1193. The method for vaccination according to item 1172, wherein the individual in need thereof has one or more symptoms of one or more diseases.

[2438] 1194. The method for vaccination according to item 1172, wherein the individual in need thereof is asymptomatic.

[2439] 1195. The method for vaccination according to item 1172, wherein the individual in need thereof is genetically disposed for one or more diseases.

[2440] 1196. The method for vaccination according to item 1172, wherein the individual in need thereof is an animal.

[2441] 1197. The method for vaccination according to item 1172, wherein the individual in need thereof is a bird.

[2442] 1198. The method for vaccination according to item 1172, wherein the individual in need thereof is an insect.

[2443] 1199. The method for vaccination according to item 1172, wherein the individual in need thereof is a plant.

[2444] 1200. The method for vaccination according to item 1172, wherein the method comprises administration of said composition by oral administration.

[2445] 1201. The method for vaccination according to item 1172, wherein the method comprises administration of said composition by sublingual administration.

[2446] 1202. The method for vaccination according to item 1172, wherein the method comprises administration of said composition by nasal administration.

[2447] 1203. The method for vaccination according to item 1172, wherein the method comprises administration of said composition by inhalation.

[2448] 1204. The method for vaccination according to item 1172, wherein the method comprises administration of said composition by injection.

[2449] 1205. The method for vaccination according to item 1172, wherein the method comprises administration of said composition by intravenous administration.

[2450] 1206. The method for vaccination according to item 1172, wherein the method comprises administration of said composition by intramuscular administration.

[2451] 1207. The method for vaccination according to item 1172, wherein the method comprises administration of said composition by intrathecal administration.

[2452] 1208. The method for vaccination according to item 1172, wherein the method comprises administration of said composition by subcutan administration.

[2453] 1209. The method for vaccination according to item 1172, wherein the method comprises administration of said composition by implantation.

[2454] 1210. The method for vaccination according to item 1172, wherein the method comprises administration of said composition by rectal administration.

[2455] 1211. The method for vaccination according to item 1172, wherein the method comprises administration of said composition by vaginal administration.

[2456] 1212. The method for vaccination according to item 1172, wherein the method comprises administration of said composition by the ocular route.

[2457] 1213. The method for vaccination according to item 1172, wherein the method comprises administration of said composition by applying it to the skin (cutaneously) for a local (topical) effect.

[2458] 1214. The method for vaccination according to item 1172, wherein the method comprises administration of said composition by applying it to the skin (cutaneously) for bodywide (systemic) effect.

[2459] 1215. The method for vaccination according to item 1172, wherein the method comprises administration of said composition by delivering it through the skin (transdermally) for a systemic effect.

[2460] 1216. The method for vaccination according to item 1172, wherein the method comprises administration of said composition by inter peritoneal injection.

[2461] 1217. The method for vaccination according to item 1172, wherein the method comprises administration of said composition by transmucosal administration.

[2462] 1218. The method for vaccination according to item 1172, wherein the method comprises administration of said composition by inoculation.

[2463] 1219. The method for vaccination according to item 1172, wherein the method comprises administration of a single dose of said composition.

[2464] 1220. The method for vaccination according to item 1172, wherein the method comprises administration of several doses of said composition such as 2, 3, 4, 5, 6, 7, 8, 9, or 10 doses.

[2465] 1221. The method for vaccination according to item 1172, wherein the method comprises administration of said composition only once.

[2466] 1222. The method for vaccination according to item 1172, wherein the method comprises administration of said composition more than once such as 2, 3, 4, 5, 6, 7, 8, 9 or 10 times.

[2467] 1223. The method for vaccination according to item 1172, wherein the method comprises administration of said composition more than once with administration with intervals of a day.

[2468] 1224. The method for vaccination according to item 1172, wherein the method comprises administration of said composition more than once with administration with intervals of a days, such as 2, 3, 4, 5, 6, 7, 8, 9, 10, 11, 12, 13, or 14 days.

[2469] 1225. The method for vaccination according to item 1172, wherein the method comprises administration of said composition more than once with administration with intervals of about a week.

[2470] 1226. The method for vaccination according to item 1172, wherein the method comprises administration of said composition more than once with administration with intervals of about two weeks.

[2471] 1227. The method for vaccination according to item 1172, wherein the method comprises administration of said composition more than once with administration with intervals of about three weeks.

[2472] 1228. The method for vaccination according to item 1172, wherein the method comprises administration of said composition more than once with administration with intervals of about a month.

[2473] 1229. The method for vaccination according to item 1172, wherein the method comprises administration of said composition more than once with administration with intervals of several months, such as 2, 3, 4, 5, 6, 7, 8, 9, 10, 11 or 12 months.

[2474] 1230. The method for vaccination according to item 1172, wherein the method comprises administration of said composition more than once with administration with intervals of years, such as 2, 3, 4, 5, 6, 7, 8, 9, 10, 12, 14, 16, 18, 20, 25, 30, 40, 50, 60, 70, 80, 90, 100 or 110 years.

[2475] 1231. The method for vaccination according to item 1172, wherein the method comprises a continuous administration regime of said composition e.g. like up to four doses per week, followed by one month without administrations, followed by up to four doses per week.

[2476] 1232. The method for vaccination according to item 1172, wherein the method comprises a vaccination protocol where administration is performed e.g. on week 0, 4, 8, and 16; or on week 0, 2, 4, 6, 8, 10, 12, and 14; or on week 0, 5, 11, 17; or on month 0, 1, and 2; or on day 0, 7, and 30; or every year.

[2477] 1233. The method for vaccination according to item 1172, wherein the method comprises administration of said composition more than once and wherein the amount of pharmamer and/or peptide is increased from the first administration to one or more of the subsequent administrations.

[2478] 1234. The method for vaccination according to item 1172, wherein the method comprises administration of said composition more than once and wherein the amount of pharmamer and/or peptide is decreased from the first administration to one or more of the subsequent administrations.

[2479] 1235. The method for vaccination according to item 1172, wherein the method comprises administration of said composition more than once and wherein the ratio of biologically active molecules in said composition is modified from the first administration to one or more of the subsequent administrations.

[2480] 1236. The method for vaccination according to item 1172, wherein the method comprises administration of said composition more than once and wherein the type of adjuvant(s) in said composition is modified from the first administration to one or more of the subsequent administrations.

[2481] 1237. The method for vaccination according to item 1172, wherein the method comprises administration of said composition more than once and wherein the amount of one or more adjuvant(s) in said composition is modified from the first administration to one or more of the subsequent administrations.

[2482] 1238. The method for vaccination according to item 1172, wherein the method comprises administration of said composition more than once and wherein the combination of adjuvants in said composition is modified from the first administration to one or more of the subsequent administrations.

[2483] 1239. The method for vaccination according to item 1172, wherein the method comprises use of an administration protocol linked to age of the individual in need of said vaccine.

[2484] 1240. The method for vaccination according to item 1172, wherein the method comprises use of an administration protocol for childhood vaccines e.g. wherein the vaccine is administered at the age of 3 month, 5, month, and 12 month; or 3 month, 5, month, 12 month, and 5 years; or 15 month, and 4 years.

[2485] 1241. The method for vaccination according to item 1172, wherein the method comprises administration of said composition together with administration of one or more medicament, wherein the administration can be simultaneously or sequentially in any order.

[2486] 1242. The method for vaccination according to item 1172, wherein the composition is administered together with one or more adjuvants.

[2487] 1243. The method for vaccination according to item 1172, wherein the composition is administered simulataneously with one or more adjuvants.

[2488] 1244. The method for vaccination according to item 1172, wherein the composition is administered together with one or more adjuvants sequentially in any order.

[2489] 1245. The method for vaccination according to item 1172, wherein the vaccination is prophylactic.

[2490] 1246. The method for vaccination according to item 1172, wherein the vaccination if ameliorating.

[2491] 1247. The method for vaccination according to item 1172, wherein the vaccination is curative.

[2492] 1248. A method for monitoring a vaccine response comprising use of the composition according to item 1-1170.

[2493] 1249. A kit-of-parts comprising the composition according to item 1-1170 and at least one addition component.

[2494] 1250. Use of the kit-of-parts according to item 1249 for vaccination of an individual in need thereof.

[2495] 1251. Use of the kit-of-parts according to item 1249 for monitoring of a vaccine response.

[2496] 1252. The composition according to item 1, wherein the one or more pharmamers comprises one or more HIV and/or SIV vaccines.

[2497] 1253. The composition according to item 1, wherein the one or more pharmamers comprises a dextran carrier.

[2498] 1254. The composition according to item 1, wherein the one or more pharmamers comprises a dextran carrier derivatized by attachment of Streptavidin e.g. such as 8.6 streptavidin molecules are attached per Dextran molecule.

[2499] 1255. The composition according to item 1, wherein the one or more pharmamers comprises a dextran carrier with a molecular weight of 270 kDa.

[2500] 1256. The composition according to item 1, wherein the one or more pharmamers comprises a dextran carrier with Simian MHC class 1 molecules attached.

[2501] 1257. The composition according to item 1, wherein the one or more pharmamers comprises a dextran carrier with Mamu-A*01(CTPYDINQM) (SEQ ID NO 9569) attached.

[2502] 1258. The composition according to item 1, wherein the one or more pharmamers comprises a dextran carrier with Mamu-A*08(KPCVKLTP) attached (SEQ ID NO 9570).

[2503] 1259. The composition according to item 1, wherein the one or more pharmamers comprises a dextran carrier with Mamu-B*17(IRFPKTFGW) (SEQ ID NO 9571) attached.

[2504] 1260. The composition according to items 1257 to 1259, wherein attachment is done via a COOH-terminal Biotin molecule on the recombinant Mamu heavy chain to streptavidin molecules on the dextran carrier.

[2505] 1261. The composition according to item 1, wherein the one or more pharmamers comprises one or more biotinylated synthetic Mamu class 2 peptides.

[2506] 1262. The composition according to item 1, wherein the one or more pharmamers comprises Mamu-DQB1*0601(EFVRFDSAVGEYRAV) (SEQ ID NO 9572).

[2507] 1263. The composition according to item 1, wherein the one or more pharmamers comprises Mamu-DQB1*1808(EFVGFDSYLGVYRPV) (SEQ ID NO 9573).

[2508] 1264. The composition according to item 1, wherein the one or more pharmamers comprises Mamu-DRB*W201 (TREDILERERAQVDTFY) (SEQ ID NO 9574).

[2509] 1265. The composition according to item 1, wherein the one or more pharmamers comprises recombinant HSP70pep3Bio fragments (a biotinylated HSP70 fragment spanning amino acid residues 359-609) attached to strepavidin sites.

[2510] 1266. The composition according to item 1, wherein the one or more pharmamers comprises HIV-Gag (CTPYDINQM) (SEQ ID NO 9569).

[2511] 1267. The composition according to item 1, wherein the one or more pharmamers comprises HIV-Env (KPCVKLTP) (SEQ ID NO 9570).

[2512] 1268. The composition according to item 1, wherein the one or more pharmamers comprises Siv Nef (IRFPKTFGW) (SEQ ID NO 9571).

[2513] 1269. The composition according to item 1, wherein the one or more pharmamers comprises recombinant HIV-1gp140 trimer and SIVp27 attached by Biotin-Strepavidin binding.

[2514] 1270. The composition according to item 1, wherein the one or more pharmamers comprises Mamu-A*01(CTPYDINQM) (SEQ ID NO 9569), Mamu-DQB1*0601 (EFVRFDSAVGEYRAV) (SEQ ID NO 9572) class 2 peptide, HSP70pep3Bio, and Dextran carrier (in the molar ratio 10:10:4:1).

[2515] 1271. The composition according to item 1, wherein the one or more pharmamers comprises Mamu-A*08 (KPCVKLTP) (SEQ ID NO 9570), Mamu-DQB1*1808 (EFVGFDSYLGVYRPV) (SEQ ID NO 9573) class 2 peptide, HSP70pep3Bio and Dextran carrier (in the molar ratio 10:10:4:1).

[2516] 1272. The composition according to item 1, wherein the one or more pharmamers comprises Mamu-B*17(IRFPKTFGW) (SEQ ID NO 9571), Mamu-DRB*W201 (TREDILERERAQVDTFY) (SEQ ID NO 9574) class 2 peptide, HSP70pep3Bio and Dextran carrier (in the molar ratio 10:10:4:1).

[2517] 1273. The composition according to item 1, wherein the one or more pharmamers comprises Sivp27, HIV-1gp140trimer, HSP70pep3Bio and Dextran carrier (in the molar ratio 3:10:4).

[2518] 1274. The composition according to item 1, wherein the one or more pharmamers are absorbed into the adjuvant Alhydrogel (Aluminiumhydroxide gel) as specified by the manufacturer.

[2519] 1275. The composition according to item 1, wherein the one or more pharmamers comprises Human MHC class 1 molecules.

[2520] 1276. The composition according to item 1, wherein the one or more pharmamers comprises HLA-A*0101(IVDCLTEMY) (SEQ ID NO 9575).

[2521] 1277. The composition according to item 1, wherein the one or more pharmamers comprises HLA-A*0201(GLIQLVEGV) (SEQ ID NO 9576).

[2522] 1278. The composition according to item 1, wherein the one or more pharmamers comprises HLA-A*0301(RIAAWMATY) (SEQ ID NO 9577).

[2523] 1279. The composition according to item 1, wherein the one or more pharmamers comprises HLA-A*1101(IVTDFSVIK) (SEQ ID NO 9578).

[2524] 1280. The composition according to item 1, wherein the one or more pharmamers comprises attachment a COOH-terminal Biotin molecule on recombinant HLA heavy chain to the carrier strepavidin molecules.

[2525] 1281. The composition according to item 1, wherein the one or more pharmamers comprises biotinylated recombinant HLA class 2 protein HLA-DR*0401 and recombinant HSP70pep3Bio fragments (a biotinylated HSP70 fragment spanning amino acid residues 359-609) attached to strepavidin sites.

[2526] 1282. The composition according to item 1, wherein the one or more pharmamers comprises USP9Y, ubiquitin specific protease 9 (IVDCLTEMY) (SEQ ID NO 9575).

[2527] 1283. The composition according to item 1, wherein the one or more pharmamers comprises TRAG-3_{—}4 (GLIQLVEGV) (SEQ ID NO 9576).

[2528] 1284. The composition according to item 1, wherein the one or more pharmamers comprises BCL2L1 (RIAAWMATY) (SEQ ID NO 9577).

[2529] 1285. The composition according to item 1, wherein the one or more pharmamers comprises EBV EBNA3B (IVTDFSVIK) (SEQ ID NO 9578).

[2530] 1286. The composition according to item 1, wherein the one or more pharmamers comprises a HLA class 2 complex without a peptide in the binding groove.

[2531] 1287. The composition according to item 1, wherein the one or more pharmamers comprises a HLA class 2 complex containing unknown peptides derived from either serum or S2 production cells.

[2532] 1288. The composition according to item 1, wherein the one or more pharmamers comprises HLA-A*0101(IVDCLTEMY) (SEQ ID NO 9575), HLA-DR*0401 class 2, HSP70pep3Bio, and Dextran carrier (in the molar ratio 10:10:4:1).

[2533] 1289. The composition according to item 1, wherein the one or more pharmamers comprises HLA-A*0201(GLIQLVEGV) (SEQ ID NO 9576), HLA-A*0301(RIAAWMATY) (SEQ ID NO 9577), HSP70pep3Bio, and Dextran carrier (in the molar ratio 10:10:4:1).

[2534] 1290. The composition according to item 1, wherein the one or more pharmamers comprises HLA-A*1101(IVTDFSVIK) (SEQ ID NO 9578), HSP70pep3Bio, and Dextran carrier (in the molar ratio 10:4:1).

[2535] 1291. The composition according to item 1, wherein the one or more pharmamers are emulsified with the adjuvant Titermax Gold as specified by the manufacturer.

[2536] 1292. The composition according to item 1, wherein the one or more pharmamers comprises recombinant HIV-1gp140 trimer and SIVp27 attached by Biotin-Strepavidin binding.

[2537] 1293. The composition according to item 1, wherein the one or more pharmamers comprises biotinylated recombinant HSP70pep3Bio-CCR5-tripeptide fragment, a biotinylated fusion protein consisting of the HSP70 fragment spanning amino acid residues 359-609 plus the antigenic CCR5 loops, N-terminal loop, Loop1 and Loop2, attached to strepavidin sites.

[2538] 1294. The composition according to item 1, wherein the one or more pharmamers comprises the CCR5 peptides representing the three antigenic loops (N-terminal (MNYQVSSPIYNINYYTSEPC) (SEQ ID NO 9579); Loop1 (HYAAAQWNFGNTMCQ) (SEQ ID NO 9580); Loop2 (YSSHFPYSQYQFWKNFQTLK) (SEQ ID NO 9581)). 1295. The composition according to item 1, wherein the one or more pharmamers comprises Mamu-A*01(CTPYDINQM) (SEQ ID NO 9569), HSP70pep3Bio-CCR5-tripeptide and Dextran carrier (in the molar ratio 13:10:1).

[2539] 1296. The composition according to item 1, wherein the one or more pharmamers comprises Mamu-A*08 (KPCVKLTP) (SEQ ID NO 9570), HSP70pep3Bio-CCR5-tripeptide and Dextran carrier (in the molar ratio 13:10:1).

[2540] 1297. The composition according to item 1, wherein the one or more pharmamers comprises Mamu-B*17(IRFPKTFGW) (SEQ ID NO 9571), HSP70pep3Bio-CCR5-tripeptide and Dextran carrier (in the molar ratio 13:10:1).

[2541] 1298. The method for vaccination according to item 1172, wherein the composition is administered as intramuscular injections at time points 0, 4, 8, and 16 weeks such that a full dose is given at 0 weeks and half-full dose at 4, 8, and 16 weeks.

[2542] 1299. The method for vaccination according to item 1172, wherein the composition is administered as intramuscular injections at time points 0, 2, 4, 6, 8, 10, 12 and 14 weeks such that a full dose is given at each time point.

[2543] 1300. The composition according to item 1, wherein the composition is designed to elicit a multifunctional immune response i.e. a composite immune responses directed against the adaptive and the innate immune system; and/or both parts of the adaptive system i.e. the humoral and the cellular part.

[2544] 1301. The composition according to item 1, wherein the composition comprises one or more HLA class 1 and/or class 2 molecules.

[2545] 1302. The composition according to item 1, wherein the composition comprises one or more HLA class 1 molecules that are folded or partly folded with human b2Microglobulin and a peptide fitting into the binding groove.

[2546] 1303. The composition according to item 1, wherein the composition comprises one or more complete, partial or otherwise modified HLA class 1 heavy chain(s).

[2547] 1304. The composition according to item 1, wherein the composition comprises one or more HLA class 2 molecules consisting of folded or partly folded alpha- and beta-chains with or without a peptide in the binding groove.

[2548] 1305. The composition according to item 1, wherein the composition comprises one or more complete, partial or otherwise modified HLA class 2 alpha- and beta-chains.

[2549] 1306. The composition according to item 1, wherein the composition comprises one or more binding-peptides derived from HIV specific proteins such as Gag-Pol, Pr55(Gag), Vif, Vpr, Tat, Rev, Vpu, Nef, gp160 and derivatives such as gp120, gp41 and gp140.

[2550] 1307. The composition according to item 1, wherein the composition comprises one or more binding-peptides that are HIV unrelated.

[2551] 1308. The composition according to item 1, wherein the composition comprises HLA class 1 peptides derived from regions of the class 1 heavy chain.

[2552] 1309. The composition according to item 1, wherein the composition comprises HLA class 2 peptides derived from regions of the class 2 alpha and/or beta chain.

[2553] 1310. The composition according to item 1, wherein the composition comprises CD4 or part(s) hereof.

[2554] 1311. The composition according to item 1, wherein the composition comprises CCR 5 (Chemokine Receptor 5) or part(s) hereof.

[2555] 1312. The composition according to item 1, wherein the composition comprises the extracellular peptide-loops of CCR5.

[2556] 1313. The composition according to item 1, wherein the composition comprises HSP70 or part(s) thereof.

[2557] 1314. The composition according to item 1, wherein the composition comprises CXCR4 or part(s) hereof.

[2558] 1315. The composition according to item 1, wherein the composition comprises CCR 2 (Chemokine Receptor 2) or part(s) hereof.

[2559] 1316. The composition according to item 1, wherein the composition comprises CX3CR1 or part(s) hereof.

[2560] 1317. The composition according to item 1, wherein the composition comprises SDF-1 or part(s) hereof.

[2561] 1318. The composition according to item 1, wherein the composition comprises US28 or part(s) hereof.

[2562] 1319. The composition according to item 1, wherein the composition comprises HIV viral specific proteins i.e. Gag-Pol, Pr55(Gag), Vif, Vpr, Tat, Rev, Vpu, Nef, gp160 and derivatives such as but not limited to gp120, gp41 and gp140.

[2563] 1320. The composition according to item 1, wherein the composition comprises Simian Mamu class 1 and/or class 2 molecules (Mokey major histocompatibility antigens).

[2564] 1321. The composition according to item 1, wherein the composition comprises one or more Mamu class 1 molecules folded or partly folded with one or more human b2Microglobulin and a peptide fitting into the binding groove.

[2565] 1322. The composition according to item 1, wherein the composition comprises one or more complete, partial or otherwise modified Mamu class 1 heavy chain(s).

[2566] 1323. The composition according to item 1, wherein the composition comprises one or more Mamu class 2 molecules consisting of folded or partly folded alpha- and beta-chains with or without a peptide in the binding groove.

[2567] 1324. The composition according to item 1, wherein the composition comprises one or more complete, partial or otherwise modified Mamu class 2 alpha- and beta-chains.

[2568] 1325. The composition according to item 1, wherein the composition comprises one or more binding-peptides derived from SIV specific proteins such as Gag-Pol, Gag, Vif, Vpx, Envelope protein, and/or Nef.

[2569] 1326. The composition according to item 1, wherein the composition comprises one or more binding-peptides that are SIV unrelated.

[2570] 1327. The composition according to item 1, wherein the composition comprises Mamu class 1 peptides derived from regions of the class 1 heavy chain.

[2571] 1328. The composition according to item 1, wherein the composition comprises Mamu class 2 peptides derived from regions of the class 2 alpha and/or beta chain.

[2572] 1329. The composition according to item 1, wherein the composition comprises SIV viral specific proteins i.e. Gag-Pol, Gag, Vif, Vpx, Envelope protein, Nef; HSP70 (70 kD Heat-shock protein) or part(s) hereof.

[2573] 1330. The method for vaccination according to item 1172, wherein the composition is administered at the cervico-vaginal mucosa i.e. vaginally or IM i.e. intra-muscular. T

[2574] 1331. The method for vaccination according to item 1172, wherein the composition is administered alone or together with additional adjuvant(s) such as but not limited to Titermax Gold, Alhydrogel (Aluminium-hydroxide), MF59 and/or the proprietary Montanide ISA720.

[2575] 1332. The method for vaccination according to item 1172, wherein the vaccination is for treatment of one or more diseases caused by a viral infection.

[2576] 1333. The method for vaccination according to item 1332, wherein viral infection is caused by dsDNA vira such as Adenoviruses, Herpesviruses, Poxviruses.

[2577] 1334. The method for vaccination according to item 1332, wherein viral infection is caused by ssDNA vira (+)sense DNA such as Parvoviruses.

[2578] 1335. The method for vaccination according to item 1332, wherein viral infection is caused by dsRNA vira such as Reoviruses.

[2579] 1336. The method for vaccination according to item 1332, wherein viral infection is caused by (+)ssRNA vira (+)sense RNA such as Picornaviruses and Togaviruses.

[2580] 1337. The method for vaccination according to item 1332, wherein viral infection is caused by (−)ssRNA vira (−)sense RNA such as Orthomyxoviruses and Rhabdoviruses.

[2581] 1338. The method for vaccination according to item 1332, wherein viral infection is caused by ssRNA-RT vira (+)sense RNA with DNA intermediate in life-cycle such as Retroviruses.

[2582] 1339. The method for vaccination according to item 1332, wherein viral infection is caused by dsDNA-RT vira such as Hepadnaviruses.

[2583] 1340. The method for vaccination according to item 1332, wherein viral infection is caused by one or more vira selected from the group consisting of Abelson murine leukemia virus (Ab-MLV, A-MuLV), acute laryngotracheobronchitis virus (or HPIV), Adelaide River virus, Adeno-associated virus group (Dependevirus), Adenovirus, African horse sickness virus, African swine fever virus, AIDS virus, Aleutian mink disease, parvovirus, alfalfa mosaic virus, Alphaherpesvirinae (including HSV 1 and 2 and varicella), Alpharetrovirus (Avian leukosis virus, Rous sarcoma virus), Alphavirus, alkhurma virus, ALV related virus, Amapari virus, Andean potato mottle virus, Aphthovirus, Aquareovirus, arbovirus, arbovirus C, arbovirus group A, arbovirus group B, Arenavirus group, Argentine hemorrhagic fever virus, Argentinian hemorrhagic fever virus, Arterivirus, Astrovirus, Ateline herpesvirus group, Aujezky's disease virus, Aura virus, Ausduk disease virus, Australian bat lyssavirus, Aviadenovirus, avian erythroblastosis virus, avian infectious bronchitis virus, avian leukemia virus, Avian leukosis virus (ALV), avian lymphomatosis virus, avian myeloblastosis virus, avian paramyxovirus, avian pneumoencephalitis virus, avian reticuloendotheliosis virus, avian sarcoma virus, avian type C retrovirus group, Avihepadnavirus, Avipoxvirus, B virus (Cercopithecine herpesvirus 1), B19 virus (Parvovirus B19), Babanki virus, baboon herpesvirus, bacterial virus, baculovirus, barley yellow dwarf virus, Barmah Forest virus, bean pod mottle virus, bean rugose mosaic virus, Bebaru virus, Berrimah virus, Betaherpesvirinae, betaretrovirus, Bird flu, Birnavirus, Bittner virus, BK virus, Black Creek Canal virus, bluetongue virus, Bolivian hemorrhagic fever virus, Boma disease virus, border disease of sheep virus, borna virus, bovine alphaherpesvirus 1, bovine alphaherpesvirus 2, bovine coronavirus, bovine ephemeral fever virus, bovine immunodeficiency virus, bovine leukemia virus, bovine leukosis virus, bovine mammillitis virus, bovine papillomavirus, bovine papular stomatitis virus, bovine parvovirus, bovine syncytial virus, bovine type C oncovirus, bovine viral diarrhea virus, bracovirus, broad bean mottle virus, broad bean stain virus, brome mosaic virus, Bromovirus, Buggy Creek virus, bullet shaped virus group, Bunyamwera virus, Bunyavirus, Burkitt's lymphoma virus, Bwamba Fever, Bwattany hetero virus, CA virus (Croup-associated virus/parainfluenza virus type 2), Calicivirus, California encephalitis virus, camelpox virus, canarypox virus, canid herpesvirus, canine coronavirus, canine distemper virus, canine herpesvirus, canine minute virus, canine parvovirus, Cano Delgadito virus, Capillovirus, caprine arthritis virus, caprine encephalitis virus, Caprine Herpes Virus, Capripox virus, Cardiovirus, Carlavirus, Carmovirus, carrot mottle virus, Cassia yellow blotch virus, Caulimovirus, Cauliflower mosaic virus, caviid herpesvirus 1, Cercopithecine herpesvirus 1, Cercopithecine herpesvirus 2, cereal yellow dwarf virus, Chandipura virus, Changuinola virus, channel catfish virus, Charleville virus, chickenpox virus, Chikungunya virus, chimpanzee herpesvirus, Chordopoxyirinae, chub reovirus, chum salmon virus, Closterovirus, Cocal virus, Coho salmon reovirus, coital exanthema virus, Colorado tick fever virus, Coltivirus Columbia SK virus, Commelina yellow mottle virus, Common cold virus, Comovirus, Condylomata accuminata, congenital cytomegalovirus, contagious eethyma virus, contagious pustular dermatitis virus, Coronavirus, Corriparta virus, coryza virus, cowpea chlorotic mottle virus, cowpea mosaic virus, cowpea virus, cowpox virus, coxsackie virus, CPV (cytoplasmic polyhedrosis virus), cricket paralysis virus, Crimean-Congo hemorrhagic fever virus, croup associated virus, Crypotovirus, Cucumovirus, Cypovirus, Cytomegalovirus (HCMV or Human Herpesvirus 5 HHV-5), cytoplasmic polyhedrosis virus, Cytorhabdovirus, deer papillomavirus, Deltaretrovirus (Human T-lymphotrophic virus), Deformed wing virus DWV, Dengue, Densovirus, Dependovirus, Dhori virus, Dianthovirus, diplorna virus, DNA virus, Dobrava-Belgrade Virus, Dog Flu, Drosophila C virus, duck hepatitis B virus, duck hepatitis virus 1, duck hepatitis virus 2, duovirus, Duvenhage virus, eastern equine encephalitis virus, eastern equine encephalomyelitis virus, Ebola virus, Ebola-like virus, Echovirus, echovirus 10, echovirus 28, echovirus 9, ectromelia virus, EEE virus (Eastern equine encephalitis virus), EIA virus (equine infectious anemia), EMC virus (Encephalomyocarditis), Emiliania huxleyi virus 86, encephalitis virus, encephalomyocarditis virus, Endogenous retrovirus, Enterovirus, Entomopoxyirinae, Entomopoxvirus A, Entomopoxvirus B, Entomopoxvirus C, enzyme elevating virus, epidemic hemorrhagic fever virus, epizootic hemorrhagic disease virus, Epsilonretrovirus, Epstein-Barr virus (EBV; Human herpesvirus 4 HHV-4), equid alphaherpesvirus 1, equid alphaherpesvirus 4, equid herpesvirus 2, equine abortion virus, equine arteritis virus, equine encephalosis virus, equine infectious anemia virus, equine morbillivirus, equine rhinopneumonitis virus, equine rhinovirus, Eubenangu virus, European elk papillomavirus, European swine fever virus, Everglades virus, Eyach virus, Fabavirus, felid herpesvirus 1, feline calicivirus, feline fibrosarcoma virus, feline herpesvirus, feline immunodeficiency virus, feline infectious peritonitis virus, feline leukemia/sarcoma virus, feline leukemia virus, feline panleukopenia virus, feline parvovirus, feline sarcoma virus, feline syncytial virus, Fijivirus, Filovirus, Flanders virus, Flavivirus, foot and mouth disease virus, Fort Morgan virus, Four Corners hantavirus, fowl adenovirus 1, Fowlpox virus, Friend virus, Furovirus, Gammaherpesvirinae, gammaretrovirus, GB virus C (GBV-C; formerly Hepatitis G virus), Geminivirus, German measles virus, Getah virus, gibbon ape leukemia virus, green monkey virus (mullburg), glandular fever virus, goatpox virus, golden shinner virus, Gonometa virus, goose parvovirus, granulosis virus, Gross' virus, ground squirrel hepatitis B virus, group A arbovirus, Guanarito virus, guinea pig cytomegalovirus, guinea pig type C virus, Hantavirus, hard clam reovirus, hare fibroma virus, HCMV (human cytomegalovirus), helper virus, hemadsorption virus 2, hemagglutinating virus of Japan, hemorrhagic fever virus, Hendra virus, Henipaviruses, Hepadnavirus, hepatitis A virus, hepatitis B virus, hepatitis C virus, hepatitis D (delta) virus, hepatitis E virus, hepatitis F virus, hepatitis G virus, hepatitis nonA nonB virus, hepatoencephalomyelitis reovirus 3, Hepatovirus, heron hepatitis B virus, herpes B virus, Herpes simplex virus, herpes simplex virus 1, herpes simplex virus 2, Herpesvirus, Herpes zoster, Herpes virus 6, Herpes virus 7, Herpes virus 8, Herpesvirus ateles, Herpesvirus hominis, Herpesvirus saimiri, Herpesvirus suis, Herpesvirus varicellae, Highlands J virus, Hirame rhabdovirus, HIV-1, hog cholera virus, Hordeivirus, Horse Flu, HTLV-1, HTLV-2, human adenovirus 2, human alphaherpesvirus 1, human alphaherpesvirus 2, human alphaherpesvirus 3, human B lymphotrophic virus, human betaherpesvirus 5, human coronavirus, Human enterovirus A, Human enterovirus B, Human Flu, human foamy virus, human gammaherpesvirus 4, human gammaherpesvirus 6, human hepatitis A virus, human herpesvirus 1 group, human herpesvirus 2 group, human herpesvirus 3 group, human herpesvirus 4 group, human herpesvirus 6, human herpesvirus 8, human immunodeficiency virus (HIV), human immunodeficiency virus 1, human immunodeficiency virus 2, Human metapneumovirus, human papillomavirus, human T cell leukemia virus, human T cell leukemia virus I, human T cell leukemia virus II, human T cell leukemia virus III, human T cell lymphoma virus I, human T cell lymphoma virus II, human T cell lymphotrophic virus type 1, human T cell lymphotrophic virus type 2, human T lymphotrophic virus I, human T lymphotrophic virus II, human T lymphotrophic virus III, ichnovirus, Ilarvirus, infantile gastroenteritis virus, infectious bovine rhinotracheitis virus, infectious haematopoietic necrosis virus, infectious pancreatic necrosis virus, influenza virus, influenzavirus A, influenzavirus B, influenzavirus C, influenzavirus D, influenzavirus pr8, insect iridescent virus, insect virus, interfering virus, iridovirus, Isavirus, Japanese B virus, Japanese encephalitis virus, JC virus, Junin virus, Johnson grass mosaic virus, Kaposi's sarcoma-associated herpesvirus, Kemerovo virus, Kilham's rat virus, Klamath virus, Kolongo virus, Korean hemorrhagic fever virus, kumba virus, Kumlinge virus, Kunjin virus, Kyasanur forest disease, Kyzylagach virus, La Crosse virus, lactic dehydrogenase elevating virus, Lagos bat virus, Lambda phage, langat virus, Langur virus, lapine parvovirus, Lassa fever virus, Lassa virus, latent rat virus, LCM virus, Leaky virus, Lentivirus, Leporipoxvirus, leukemia virus, leukovirus, louping ill virus, lumpy skin disease virus, Luteovirus, lymphadenopathy associated virus, Lymphocytic choriomeningitis virus (LCMV), Lymphocryptovirus, lymphocytic choriomeningitis virus, lymphoproliferative virus group, Lyssavirus, Machupo virus, mad itch virus, maize chlorotic dwarf virus, maize rough dwarf virus, mammalian type B oncovirus group, mammalian type B retroviruses, mammalian type C retrovirus group, mammalian type D retroviruses, mammary tumor virus, Mapuera virus, Marafivirus, Marburg virus, Marburg-like virus, Mason Pfizer monkey virus, Mastadenovirus, Mayaro virus, ME virus, Measles virus, Melandrium yellow fleck virus, Menangle virus, Mengo virus, Mengovirus, Merkel cell polyomavirus, Middelburg virus, milkers nodule virus, mink enteritis virus, minute virus of mice, MLV related virus, MM virus, Mokola virus, Molluscipoxvirus, Molluscum contagiosum virus, Moloney murine leukemia virus (M-MuLV), monkey B virus, Monkeypox virus, Mononegavirales, Morbillivirus, Mount Elgon bat virus, mouse cytomegalovirus, mouse encephalomyelitis virus, mouse hepatitis virus, mouse K virus, mouse leukemia virus, mouse mammary tumor virus, mouse minute virus, mouse pneumonia virus, mouse poliomyelitis virus, mouse polyomavirus, mouse sarcoma virus, mousepox virus, Mozambique virus, Mucambo virus, mucosal disease virus, Mumps virus, murid betaherpesvirus 1, murid cytomegalovirus 2, murine cytomegalovirus group, murine encephalomyelitis virus, murine hepatitis virus, murine leukemia virus, murine nodule inducing virus, murine polyomavirus, murine sarcoma virus, Muromegalovirus, Murray Valley encephalitis virus, myxoma virus, Myxovirus, Myxovirus multiforme, Myxovirus parotitidis, Nairobi sheep disease virus, Nairovirus, Nanirnavirus, Nariva virus, Ndumo virus, Necrovirus, Neethling virus, Nelson Bay virus, Nemtick Virus, Nepovirus, neurotropic virus, New World Arenavirus, newborn pneumonitis virus, Newcastle disease virus, Nipah virus, noncytopathogenic virus, Norovirus, Norwalk virus, nuclear polyhedrosis virus (NPV), nipple neck virus, O'nyong'nyong virus, oat sterile dwarf virus, Ockelbo virus, Omsk hemorrhagic fever virus, oncogenic virus, oncogenic viruslike particle, oncornavirus, Orbivirus, Orf virus, Oropouche virus, Orthohepadnavirus, orthomyxovirus, Orthopoxvirus, Orthoreovirus, Orungo, ovine papillomavirus, ovine catarrhal fever virus, owl monkey herpesvirus, Palyam virus, Papillomavirus, Papillomavirus sylvilagi, Papovavirus, Parainfluenza virus human (HPIV), parainfluenza virus type 1 human (HPIV-1), parainfluenza virus type 2 human (HPIV-2), parainfluenza virus type 3 human (HPIV-3), parainfluenza virus type 4 human (HPIV-4), Paramyxovirus, Parapoxvirus, paravaccinia virus, parsnip yellow fleck virus, Parvovirus, Parvovirus B19, pea enation mosaic virus, Pestivirus, Phlebovirus, phocine distemper virus, Phytoreovirus, Picodnavirus, Picornavirus, pig cytomegalovirus, pigeonpox virus, Piry virus, Pixuna virus, plant rhabdovirus group, plant virus, pneumonia virus of mice, Pneumovirus, Poliomyelitis virus, Poliovirus, Polydnavirus, polyhedral virus, Polyoma virus, Polyomavirus, Polyomavirus bovis, Polyomavirus cercopitheci, Polyomavirus hominis 2, Polyomavirus maccacae 1, Polyomavirus muris 1, Polyomavirus muris 2, Polyomavirus papionis 1, Polyomavirus papionis 2, Polyomavirus sylvilagi, Pongine herpesvirus 1, porcine epidemic diarrhea virus, porcine hemagglutinating encephalomyelitis virus, porcine parvovirus, porcine transmissible gastroenteritis virus, porcine type C virus, Potato leaf roll virus, Potato mop top virus, Potato virus Y, Potexvirus, Potyvirus, Powassan encephalitis virus, Poxvirus, poxvirus variolae, Prospect Hill virus, provirus, pseudocowpox virus, pseudorabies virus, psittacinepox virus, Puumala virus, Qalyub virus, Quail pea mosaic virus, quailpox virus, Queensland fruitfly virus, Quokkapox virus, rabbit fibroma virus, rabbit kidney vaculolating virus, rabbit papillomavirus, Rabies virus, raccoon parvovirus, raccoonpox virus, radish mosaic virus, Ranikhet virus, rat cytomegalovirus, rat parvovirus, rat virus, Rauscher's virus, recombinant vaccinia virus, recombinant virus, Red Clover Necrotic Mosaic Virus, reovirus, reovirus 1, reovirus 2, reovirus 3, reptilian type C virus, Respiratory syncytial virus, respiratory virus, reticuloendotheliosis virus, Retrovirus, Rhabdovirus, Rhabdovirus carpia, Rhadinovirus, Rhinovirus, Rhizidiovirus, rice dwarf virus, rice gall dwarf virus, rice hoja blanca virus, rice ragged stunt virus, Rift Valley fever virus, Riley's virus, rinderpest virus, RNA tumor virus, RNA virus, Roseolovirus, Ross River virus, Rotavirus, rougeole virus, Rous sarcoma virus, Rubella virus, rubeola virus, Rubivirus, Russian autumn encephalitis virus, S6-14-03 virus, SA 11 simian virus, SA 15, SA2 virus, SA6 virus, SA8 virus, Sabia virus, Sabio virus, Sabo virus, Saboya virus, Sabulodes caberata GV, Sacbrood virus, Saccharomyces cerevisiae virus L-A, Saccharomyces cerevisiae virus La, Saccharomyces cerevisiae virus LBC, Sagiyama virus, Saguaro cactus virus, Saimiriine herpesvirus 1, Saimiriine herpesvirus 2, Sainpaulia leaf necrosis virus, SaintAbb's Head virus, Saint-Floris virus, Sakhalin virus, Sal Vieja virus, Salanga virus, Salangapox virus, Salehabad virus, salivary gland virus, Salmonid herpesvirus 1, Salmonid herpesvirus 2, Salmonis virus, Sambucus vein clearing virus, Samia cynthia NPV, Samia pryeri NPV, Samia ricini NPV, Sammons' Opuntia virus, SanAngelo virus, San Juan virus, San Miguel sealion virus, San Perlita virus, Sand rat nuclear inclusion agents, Sandfly fever Naples virus, Sandfly fever Sicilian virus, Sandjimba virus, Sango virus, Santa Rosa virus, Santarem virus, Santosai temperate virus, Sapphire II virus, Sapporo-like virus, Saraca virus, Sarracenia purpurea virus, SARS virus, satellite virus, Sathuperi virus, Satsuma dwarf virus, Saturnia pavonia virus, Saturnia pyri NPV, Saumarez Reef virus, Sawgrass virus, Sceliodes cordalis NPV, Schefflera ringspot virus, Sciaphila duplex GV, Scirpophaga incertulas NPV, Sciurid herpesvirus, Sciurid herpesvirus 2, Scoliopteryx libatFix NPV, Scopelodes contracta NPV, Scopelodes venosa NPV, Scopula subpunctaria NPV, Scotogramma trifolii GV, Scotogramma trifolu NPV, Scrophularia mottle virus, SDAV (sialodacryoadenitis virus), sealpox virus, Selenephera lunigera NPV, Selepa celtis GV, Seletar virus, Selidosema suavis NPV, Semidonta biloba NPV, Semiothisa sexmaculata GV, Semliki Forest Virus, Sena Madureira virus, Sendai virus, SENV-D, SENV-H, Seoul virus, Sepik virus, Serra do Navio virus, Serrano golden mosaic virus, Sesame yellow mosaic virus, Sesamia calamistis NPV, Sesamia cretica GV, Sesamia inferens NPV, Sesamia nonagrioides GV, Setora nitens virus, Shallot latent virus, Shamonda virus, Shark River virus, Sheep associated malignant catarrhal fever, Sheep papillomavirus, Sheep pulmonary adenomatosis associated herpesvirus, sheeppox virus, Shiant Islands virus, Shokwe virus, Shope fibroma virus, Shope papilloma virus, Shuni virus, Siamese cobra herpesvirus, Sibine fusca densovirus, Sida golden mosaic virus (SiGMV), Sida golden yellow vein virus (SiGYVV), Sigma virus, Sikte water-borne virus, Silverwater virus, Simbu virus, Simian adenoviruses 1 to 27, Simian agent virus 12, Simian enterovirus 1 to 18, simian foamy virus, Simian hemorrhagic fever virus, simian hepatitis A virus, simian human immunodeficiency virus, simian immunodeficiency virus, simian parainfluenza virus, Simian rotavirus SA11, Simian sarcoma virus, simian T cell lymphotrophic virus, Simian type D virus 1, Simian vancella herpesvirus, simian virus, simian virus 40, Simplexvirus, Simulium vittatum densovirus, Sin Nombre virus, Sindbis virus, Sint1em's onion latent virus, Sixgun city virus, Skunkpox virus, Smallpox virus, Smelt reovirus, Smerinthus ocellata NPV, Smithiantha virus, Snakehead rhabdovirus, Snowshoe hare virus, Snyder-Theilen feline sarcoma virus, Sobemovirus, Sofyn virus, Soil-borne wheat mosaic virus, Sokoluk virus, Solanum apical leaf curl virus, Solanum nodiflorum mottle virus, Solanurn yellows virus, Soldado virus, Somerville virus 4, Sonchus mottle virus, Sonchus virus, Sonchus yellow net virus, Sorghum chlorotic spot virus, Sorghum mosaic virus, Sorghum virus, Sororoca virus, Soursop yellow blotch virus, SouthAfrican passiflora virus, South American hemorrhagic fever viruses, SouthAfrican passiflora virus, South River virus, Southern bean mosaic virus, Southern potato latent virus, Sowbane mosaic virus, Sowthistle yellow vein virus, Soybean chlorotic mottle virus, Soybean crinkle leaf virus, Soybean dwarf virus, Soybean mosaic virus, SPAr-2317 virus, Sparganothis pettitana NPV, sparrowpox virus, Spartina mottle virus, Spectacled caimanpox virus, SPH 114202 virus, Sphenicid herpesvirus 1, Sphinx ligustri NPV, Spider monkey herpesvirus, Spilarctia subcarnea NPV, Spilonota ocellana NPV, Spilosoma lubricipeda NPV, Spinach latent virus, Spinach temperate virus, Spiroplasma phage 1, Spiroplasma phage 4, Spiroplasma phage aa, Spiroplasma phage C1/T52, Spodoptera exempta cypovirus, Spodoptera exigua virus, Spodoptera frugiperda virus, Spodoptera latifascia virus, Spodoptera littoralis, Spodoptera mauritia virus, Spodoptera ornithogalli virus, Spondweni virus, spring beauty latent virus, Spring viremia of carp virus, Spumavirus (SFV, HFV), Squash leaf curl virus, squash mosaic virus, squirrel fibroma virus, Squirrel monkey herpesvirus, squirrel monkey retrovirus, SR-11 virus, Sri Lankan passionfruit mottle virus, Sripur virus, SSV 1 virus group, StAbbs Head virus, St. Louis encephalitis virus, Staphylococcus phage 107, Staphylococcus phage 187, Staphylococcus phage 2848A, Staphylococcus phage 3A, Staphylococcus phage 44A HJD, Staphylococcus phage 77, Staphylococcus phage B11-M15, Staphylococcus phage Twort, Starlingpox virus, Statice virus Y, P, STLV (simian T lymphotrophic virus) type I, STLV (simian T lymphotrophic virus) type II, STLV (simian T lymphotrophic virus) type III, stomatitis papulosa virus, Stratford virus, Strawberry crinkle virus, Strawberry latent ringspot virus, Strawberry mild yellow edge virus, Strawberry vein banding virus, Streptococcus phage 182, Streptococcus phage 2BV, Streptococcus phage A25, Streptococcus phage 24, Streptococcus phage PE1, Streptococcus phage VD13, Streptococcus phage fD8, Streptococcus phage CP-1, Streptococcus phage Cvir, Streptococcus phage H39, Strigid herpesvirus 1, Striped bass reovirus, Striped Jack nervous, necrosis virus, Stump-tailed macaque virus, submaxillary virus, Subterranean clover mottle virus, Subterranean clover mottle virus satellite, Subterranean clover red leaf virus, Subterranean clover stunt virus, Sugarcane bacilliform virus, Sugarcane mild mosaic virus, Sugarcane mosaic virus, Sugarcane streak virus, suid alphaherpesvirus 1, suid herpesvirus 2, Suipoxvirus, Sulfolobus virus 1, Sunday Canyon virus, Sunflower crinkle virus, Sunflower mosaic virus, Sunflower rugose mosaic virus, Sunflower yellow blotch virus, Sunflower yellow ringspot virus, Sun-hemp mosaic virus, swamp fever virus, Sweet clover necrotic mosaic virus, Sweet potato A virus, Sweet potato chlorotic leafspot virus, Sweet potato feathery mottle virus, Sweet potato internal cork virus, Sweet potato latent virus, Sweet potato mild mottle virus, Sweet potato russet crack virus, Sweet potato vein mosaic virus, Sweet potato yellow dwarf virus, Sweetwater Branch virus, Swine cytomegalovirus, Swine Flu, Swine infertility and respiratory syndrome virus, swinepox virus, Swiss mouse leukemia virus, Sword bean distortion mosaic virus, Synaxis jubararia NPV, Synaxis pallulata NPV, Synetaeris tenuifemur virus, Syngrapha selecta NPV, T4 phage, T7 phage, TAC virus, Tacaiuma virus, Tacaribe complex virus, Tacaribe virus, Tadpole edema virus LT 1-4, Taggert virus, Tahyna virus, Tai virus, Taiassui virus, Tamana bat virus, Tamarillo mosaic virus, Tamdy virus, Tamiami virus, Tanapox virus, Tanga virus, Tanjong Rabok virus, Taro bacilliform virus, Badnavirus Tataguine virus, Taterapox virus, Taterapox virus, Teasel mosaic virus, Tehran virus, Telfairia mosaic virus, Telok Forest virus, Tembe virus, Tembusu virus, Tench reovirus, Tensaw virus, Tenvivirus, Tephrosia symptomless virus, Termeil virus, Tete virus, Tetralopha scortealis NPV, Tetropium cinnamoptemm NPV, Texas pepper virus, Thailand virus, Thaumetopoea pityocampa virus, Theiler's encephalomyelitis virus, Theiler's virus, Theophila mandarina NPV, Theretra japonica NPV, Thermoproteus virus 1, Thermoproteus virus 2, Thermoproteus virus 3, Thermoproteus virus 4, Thiafora virus, Thimiri virus, Thistle mottle virus, Thogoto virus, Thormodseyjarklettur virus, Thosea asigna virus, Thosea baibarana NPV, Thosea sinensis GV, Thottapalayam virus, Thylidolpteryx ephemeraeformis NPV, Thymelicus lineola NPV, Tibrogargan virus, Ticera castanea NPV, Tick borne encephalitis virus (TBEV)—European and Far Eastern subtypes, Tillamook virus, Tilligerry virus, Timbo virus, Tilmboteua virus, Tilmaroo virus, Tindholmur virus, Tinea pellionella NPV, Tineola hisselliella NPV, Tinpula paludosa NPV, Tinracola plagiata NPV, Tioman virus, Tlacotalpan virus, Tobacco bushy top virus, Tobacco etch virus, Tobacco leaf curl virus, Tobacco mild green mosaic virus, tobacco mosaic virus, Tobacco mosaic virus satellite, Tobacco mottle virus, Tobacco necrosis virus, Tobacco necrosis virus satellite, Tobacco necrosis virus small satellite, Tobacco necrotic dwarf virus, tobacco rattle virus, Tobacco ringspot virus, Tobacco streak virus, Tobacco stunt virus, Tobacco vein banding mosaic virus, Tobacco vein distorting virus Tobacco vein mottling virus, Tobacco wilt virus, Tobacco yellow dwarf virus, Tobacco yellow net virus, Tobacco yellow vein virus, Tobamovirus Tobravirus, Togavirus, Tomato apical stunt viroid, Tomato aspermy virus, Tomato black ring virus, Tomato black ring virus satellite, Tomato bunchy top viroid, tomato bushy stunt virus, Tomato bushy stunt virus satellite, Tomato golden mosaic virus, Tomato leaf crumple virus, Tomato leaf curl virus, Tomato leafroll virus, Tomato mosaic virus, Tomato mottle virus, Tomato pale chlorosis virus, Tomato planta macho viroid, Tomato pseudo-curly top virus, Tomato ringspot virus, Tomato spotted wilt virus, Tomato top necrosis virus, Tomato vein yellowing virus, Tomato yellow dwarf virus, Tomato yellow leaf curl virus, Tomato yellow mosaic virus, Tomato yellow top virus, Tombusvirus, Tongan vanilla virus, Torovirus, Torque teno virus, Tortrix loeflingiana NPV, Tortrix viridana NPV, Toscana virus, Tospovirus, Toxorhynchites brevipalpis NPV, Trabala vishnou NPV, Tradescantia/Zebrina virus, Trager duck spleen necrosis virus, Tranosema sp. Virus, transforming virus, Tree shrew adenovirus 1, Tree shrew herpesvims, Triatoma virus, Tribec virus, Trichiocampus irregularis NPV, Trichiocampus viminalis NPV, Trichomonas vaginalis virus, Trichoplusia ni cypovirus 5, Trichoplusia ni granulovirus, Trichoplusia ni MNPV, Trichoplusia ni Single SNPV, Trichoplusia ni virus, Trichosanthes mottle virus, Triticum aestivum chlorotic spot virus, Trivittatus virus, Trombetas virus, Tropaeolum virus 1, Tropaeolum virus 2, Trubanarnan virus, Tsuruse virus, Tucunduba virus, Tulare apple mosaic virus, Tulip band breaking virus, Tulip breaking virus, Tulip chlorotic blotch virus, Tulip top breaking virus, Tulip virus X, tumor virus, Tupaia virus, Tupaiid herpesvirus 1, Turbot herpesvirus, Turbot reovirus, Turkey adenoviruses 1 to 3, Turkey coronavirus, Turkey herpesvirus 1, turkey rhinotracheitis virus, turkeypox virus, Turlock virus, Turnip crinkle virus, Turnip crinkle virus satellite, Turnip mild yellows virus, Turnip mosaic virus, Turnip rosette virus, turnip yellow mosaic virus, Turuna virus, Tymovirus, Tyuleniy virus, type C retroviruses, type D oncovirus, type D retrovirus group, Uasin Gishu disease virus, Uganda S virus, Ugymyia sericariae NPV, ulcerative disease rhabdovirus, Ullucus mild mottle virus, Ullucus mosaic virus, Ullucus virus C, Umatilla virus, Umbre virus, Una virus, Upolu virus, UR2 sarcoma virus, Uranotaenia sapphirina NPV, Urbanus proteus NPV, Urucuri virus, Ustilago maydis virus 1, Ustilago maydis virus 4, Ustilago maydis virus 6, Usutu virus, Uting a virus, Utive virus, Uukuniemi virus group, Vaccinia virus, Vaeroy virus, Vallota mosaic virus, Vanessa atalanta NPV, Vanessa cardui NPV, Vanessa prorsa NPV, Vanilla mosaic virus, Vanilla necrosis virus, Varicella zoster virus, Varicellovirus, Varicola virus, variola major virus, variola virus, Vasin Gishu disease virus, Vellore virus, Velvet tobacco mottle virus, Velvet tobacco mottle virus satellite, Venezuelan equine encephalitis virus, Venezuelan equine encephalomyelitis virus, Venezuelan hemorrhagic fever virus, Vesicular stomatitis virus, Vesiculovirus, Vibrio phage 06N-22P, Vibrio phage 06N-58P, Vibrio phage 4996, Vibrio phage a3a, Vibrio phage I, Vibrio phage II, Vibrio phage m, Vibrio phage IV, Vibrio phage kappa, Vibrio phage nt-1, Vibrio phage OXN-52P, Vibrio phage OXN-IOOP, Vibrio phage v6, Vibrio phage VfI2, Vibrio phage Vf33, Vibrio phage VP1, Vibrio phage VP11, Vibrio phage VP3, Vibrio phage VP5, Vibrio phage X29, Vicia cryptic virus, Vigna sinensis mosaic virus, Vilyuisk virus, Vinces virus, Viola mottle virus, viper retrovirus, viral haemorrhagic septicemia virus, virus-like particle, Visna Maedi virus, Visna virus, Voandzeia mosaic virus, Voandzeia necrotic mosaic virus, volepox virus, Wad Medani virus, Wallal virus, Walleye epidermal hyperplasia, Walrus calicivirus, Wanowrie virus, Warrego virus, Watermelon chlorotic stunt virus, Watermelon curly mottle virus, Watermelon mosaic virus 1, Watermelon mosaic virus 2, Weddel water-borne virus, Weldona virus, Wesselsbron virus, West Nile virus, western equine encephalitis virus, western equine encephalomyelitis virus, Wexford virus, Whataroa virus, Wheat American striate mosaic virus, Wheat chlorotic streak virus, Wheat dwarf virus, Wheat rosette stunt virus, Wheat streak mosaic virus, Wheat yellow leaf virus, Wheat yellow mosaic virus, White bryony virus, White clover cryptic virus 1, White clover cryptic virus 2, White clover cryptic virus 3, White clover mosaic virus, White lupinrnosaic virus, Wild cucumber mosaic virus, Wild potato mosaic virus, Wildbeest herpesvirus, Wineberry latent virus, Winter wheat mosaic virus, Winter wheat Russian mosaic virus, Wiseana cervinata virus, Wiseana signata virus, Wiseana umbraculata virus, Wissadula mosaic virus, Wisteria vein mosaic virus, Witwatersrand virus, Wongal virus, Wongorr virus, Winter Vomiting Virus, woodchuck hepatitis B virus, Woodchuck herpesvirus marmota 1, woolly monkey sarcoma virus, wound tumor virus, WRSV virus, WVU virus 2937, WW virus 71 to 212, Wyeomyia smithii NPV, Wyeomyia virus, Xanthomonas phage Cf, Xanthomonas phage Cflt, Xanthomonas phage RR66, Xanthomonas phage Xf, Xanthomonas phage Xf2, Xanthomonas phage XP5, Xenopus virus T21, Xiburema virus, Xingu virus, Xylena curvimacula NPV, Y73 sarcoma virus, Yaba monkey tumor virus, Yaba-1 virus, Yaba-7 virus, Yacaaba virus, Yam mosaic virus, Yaounde virus, Yaquina Head virus, Yatapoxvirus, Yellow fever virus, Yogue virus, Yokapox virus, Yokase virus, Yponomeuta cognatella NPV, Yponomeuta evonymella NPV, Yponomeuta malinellus NPV, Yponomeuta padella NPV, Yucca baciliform virus, Yug Bogdanovac virus, Zaliv Terpeniya virus, Zea mays virus, Zegla virus, Zeiraphera diniana virus, Zeiraphera pseudotsugana NPV, Zika virus, Zirqa virus, Zoysia mosaic virus, Zucchini yellow fleck virus, Zucchini yellow mosaic virus and Zygocactus virus.

[2584] 1341. The method for vaccination according to item 1172, wherein the vaccination is for treatment of one or more diseases caused by a bacterial infection.

[2585] 1342. The method for vaccination according to item 1341, wherein bacterial infection is caused by one or more bacteria selected from the group consisting of Acidobacteria, Actinobacteria, Aquificae, Bacteroidetes, Chlamydiae, Chlorobi, Chloroflexi, Chrysiogenetes, Cyanobacteria, Deferribacteres, Deinococcus-Thermus, Dictyoglomi, Fibrobacteres, Firmicutes, Fusobacteria, Gemmatimonadetes, Nitrospirae, Planctomycetes, Proteobacteria, Spirochaetes, Thermodesulfobacteria, Thermomicrobia, Thermotogae and Verrucomicrobia bacterial phyla; these may be Gram negative (Spirochetal, Chlamydiae, Proteobacteria α, β, γ) and Gram positive bacteria (Firmicutes, Actinobacteria (Mycobacterium, Actinomycetales)).

[2586] 1343. The method for vaccination according to item 1341, wherein bacterial infection is caused by one or more bacteria selected from the group consisting of Acetobacter aurantius, Acinetobacter species, Acinetobacter baumannii, Acinetobacter calcoaceticus, Acinetobacter johnsonii, Acinetobacter junii, Acinetobacter lwoffii, Acinetobacter radioresistens, Acinetobacter septicus, Acinetobacter schindleri, Acinetobacter ursingii; Actinomyces species: Actinomyces bovis, Actinomyces bowdenii, Actinomyces canis, Actinomyces cardiffensis, Actinomyces catuli, Actinomyces coleocanis, Actinomyces dentalis, Actinomyces denticolens, Actinomyces europaeus, Actinomyces funkei, Actinomyces georgiae, Actinomyces gerencseriae, Actinomyces graevenitzii, Actinomyces hongkongensis, Actinomyces hordeovulneris, Actinomyces howellii, Actinomyces humiferus, Actinomyces hyovaginalis, Actinomyces israelii, Actinomyces marimammalium, Actinomyces meyeri, Actinomyces naeslundii, Actinomyces nasicola, Actinomyces neuii, Actinomyces odontolyticus, Actinomyces oricola, Actinomyces radicidentis, Actinomyces radingae, Actinomyces slackii, Actinomyces streptomycini, Actinomyces suimastitidis, Actinomyces suis, Actinomyces turicensis, Actinomyces urogenitalis, Actinomyces vaccimaxillae, Actinomyces viscosus; Actinobacillus species: Actinobacillus actinomycetemcomitans, Actinobacillus arthritidis, Actinobacillus capsulatus, Actinobacillus delphinicola, Actinobacillus equuli, Actinobacillus hominis, Actinobacillus indolicus, Actinobacillus lignieresii, Actinobacillus minor, Actinobacillus muris, Actinobacillus pleuropneumoniae, Actinobacillus porcinus, Actinobacillus rossii, Actinobacillus scotiae, Actinobacillus seminis, Actinobacillus succinogenes, Actinobacillus suis, Actinobacillus ureae; Aeromonas species: Aeromonas allosaccharophila, Aeromonas bestiarum, Aeromonas bivalvium, Aeromonas encheleia, Aeromonas enteropelogenes, Aeromonas euchrenophila, Aeromonas hydrophila, Aeromonas ichthiosmia, Aeromonas jandaei, Aeromonas media, Aeromonas molluscorum, Aeromonas popoffii, Aeromonas punctata, Aeromonas salmonicida, Aeromonas schubertii, Aeromonas sharmana, Aeromonas simiae, Aeromonas sobria, Aeromonas veronii; Afipia felis, Agrobacterium species, Agrobacterium radiobacter, Agrobacterium rhizogenes, Agrobacterium rubi, Agrobacterium tumefaciens; Agromonas species, Alcaligenes species: Alcaligenes aquatilis, Alcaligenes eutrophus, Alcaligenes faecalis, Alcaligenes latus, Alcaligenes xylosoxidans; Alishewanella species, Alterococcus species, Anaplasma phagocytophilum, Anaplasma marginale, Aquamonas species, Arcanobacterium haemolyticum, Aranicola species, Arsenophonus species, Azotivirga species, Azotobacter vinelandii, Azotobacter chroococcum, Bacillary dysentery (Shigellosis), Bacillus species: Bacillus abortus (Brucella melitensis biovar abortus), Bacillus anthracis (Anthrax), Bacillus brevis, Bacillus cereus, Bacillus coagulans, Bacillus fusiformis, Bacillus globigii, Bacillus licheniformis, Bacillus megaterium, Bacillus mycoides, Bacillus natto, Bacillus stearothermophilus, Bacillus subtilis, Bacillus sphaericus, Bacillus thuringiensis; Bacteroides species: Bacteroides forsythus (Tannerella forsythensis), Bacteroides acidifaciens, Bacteroides distasonis (reclassified as Parabacteroides distasonis), Bacteroides gingivalis, Bacteroides gracilis, Bacteroides fragilis, Bacteroides oris, Bacteroides ovatus, Bacteroides putredinis, Bacteroides pyogenes, Bacteroides stercoris, Bacteroides suis, Bacteroides tectus, Bacteroides thetaiotaomicron, Bacteroides vulgatus; Bartonella species: Bartonella alsatica, Bartonella bacilliformis, Bartonella birtlesii, Bartonella bovis, Bartonella capreoli, Bartonella clarridgeiae, Bartonella doshiae, Bartonella elizabethae, Bartonella grahamii, Bartonella henselae (cat scratch fever), Bartonella koehlerae, Bartonella muris, Bartonella peromysci, Bartonella quintana, Bartonella rochalimae, Bartonella schoenbuchii, Bartonella talpae, Bartonella taylorii, Bartonella tribocorum, Bartonella vinsonii spp. Arupensis, Bartonella vinsonii spp. Berkhoffii, Bartonella vinsonii spp. Vinsonii, Bartonella washoensis; BCG (Bacille Calmette-Guerin), Bergeyella zoohelcum (Weeksella zoohelcum), Bifidobacterium bifidum, Blastobacter species, Blochmannia species, Bordetella species: ‘Bordetella ansorpii’, Bordetella avium, Bordetella bronchiseptica, Bordetella hinzii, Bordetella holmesii, Bordetella parapertussis, Bordetella pertussis (Whooping cough), Bordetella petrii, Bordetella trematum; Borrelia species: Borrelia anserine, Borrelia barbouri, Borrelia burgdorferi such as burgdorferi B31, Borrelia afzelii such as Borrelia afzelii ACA-1, Borrelia afzelii K78 and/or Borrelia afzelii PKo, Borrelia andersonii, Borrelia anserine, Borrelia bissettii, Borrelia burgdorferi 118a, Borrelia burgdorferi 156a, Borrelia burgdorferi 29805, Borrelia burgdorferi 64b, Borrelia burgdorferi 72a, Borrelia burgdorferi 80a, Borrelia burgdorferi 94a, Borrelia burgdorferi B31, Borrelia burgdorferi Bol26, Borrelia burgdorferi CA-11.2a, Borrelia burgdorferi WI91-23, Borrelia burgdorferi ZS7, Borrelia californiensis, Borrelia garini such as garini PBi, garini PBr, Borrelia genomosp. 1, Borrelia genomosp. 2, Borrelia japonica, Borrelia lusitaniae, Borrelia spielmanii, Borrelia spielmanii A14S, Borrelia tanukii, Borrelia turdi, Borrelia valaisiana, Borrelia valaisiana VS116, Candidatus Borrelia texasensis, Borrelia sp. AA4Pool, Borrelia sp. AI-1, Borrelia sp. B31, Borrelia sp. BC-1, Borrelia sp. CA1133, Borrelia sp. CA1176, Borrelia sp. CA128, Borrelia sp. CA13, Borrelia sp. CA134, Borrelia sp. CA142, Borrelia sp. CA20, Borrelia sp. CA22, Borrelia sp. CA27, Borrelia sp. CA28, Borrelia sp. CA29, Borrelia sp. CA31, Borrelia sp. CA33, Borrelia sp. CA370, Borrelia sp. CA372, Borrelia sp. CA378, Borrelia sp. CA388, Borrelia sp. CA393, Borrelia sp. CA394, Borrelia sp. CA395, Borrelia sp. CA399, Borrelia sp. CA400, Borrelia sp. CA401, Borrelia sp. CA402, Borrelia sp. CA404, Borrelia sp. CA411, Borrelia sp. CA426, Borrelia sp. CA443, Borrelia sp. CA446, Borrelia sp. CA448, Borrelia sp. CA462, Borrelia sp. CA468, Borrelia sp. CA502, Borrelia sp. CA504, Borrelia sp. CA507, Borrelia sp. CA547, Borrelia sp. CA552, Borrelia sp. CA8, Borrelia sp. D22, Borrelia sp. D35, Borrelia sp. FD-1, Borrelia sp. FL18, Borrelia sp. FL27, Borrelia sp. FL35, Borrelia sp. FL42., Borrelia sp. HN6, Borrelia sp. HN7, Borrelia sp. HN8, Borrelia sp. HNM13, Borrelia sp. HNM14, Borrelia sp. HNM19, Borrelia sp. IA1, Borrelia sp. Ir-3519, Borrelia sp. Ir-4721, Borrelia sp. Ir-4812, Borrelia sp. Ir-5215, Borrelia sp. LV5, Borrelia sp. MI-2, Borrelia sp. MI-5, Borrelia sp. MI-6, Borrelia sp. MI-8, Borrelia sp. MI-9, Borrelia sp. MOD-1, Borrelia sp. MOD-5, Borrelia sp. MOK-3a, Borrelia sp. MOS-1b, Borrelia sp. NE49, Borrelia sp. NE581, Borrelia sp. PHaP, Borrelia sp. PSigII, Borrelia sp. SCGT-10, Borrelia sp. SCGT-8a, Borrelia sp. SCI-2, Borrelia sp. SCW-30h, Borrelia sp. SI-1, Borrelia sp. SI-10, Borrelia sp. SM-1, Borrelia sp. SV1, Borrelia sp. W97F51, Borrelia sp. Z41293, Borrelia sp. Z41493, Borrelia coriaceae, Borrelia crocidurae, Borrelia duttonii, Borrelia duttonii Ly, Borrelia hermsii, Borrelia hermsii DAH, Borrelia hispanica, Borrelia lonestari, Borrelia miyamotoi, Borrelia parkeri, Borrelia persica, Borrelia recurrentis, Borrelia recurrentis A1, Borrelia sinica, Borrelia theileri, Borrelia turcica, Borrelia turicatae, Borrelia turicatae 91E135, Borrelia sp., Borrelia sp. ‘Lake Gaillard’, Borrelia sp. 000133, Borrelia sp. 010298, Borrelia sp. 10MT, Borrelia sp. 5145, Borrelia sp. 57Nsk, Borrelia sp. 5MT, Borrelia sp. 6T04-2, Borrelia sp. BR, Borrelia sp. BR 2007, Borrelia sp. C5-N52, Borrelia sp. CB-A1, Borrelia sp. CB-A11, Borrelia sp. CB-A3, Borrelia sp. EFL-S0100110, Borrelia sp. IK/23, Borrelia sp. IM/16, Borrelia sp. IM/19, Borrelia sp. KR1, Borrelia sp. KR3, Borrelia sp. LB-2001, Borrelia sp. LB-M56, Borrelia sp. LB-W100, Borrelia sp. MK-N61, Borrelia sp. NR-N8, Borrelia sp. OkME1, Borrelia sp. PAnz, Borrelia sp. PJes, Borrelia sp. PMai, Borrelia sp. PMew, Borrelia sp. R57, Borrelia sp. strain Spain, Borrelia sp. TA1, Borrelia sp. TM, Borrelia sp. TM1 and Borrelia sp. TM2; Bosea species, Bradyrhizobium species, Brenneria species, Brucella species: Brucella abortus, Brucella canis, Brucella melitensis, Brucella neotomae, Brucella ovis, Brucella suis, Brucella pinnipediae; Buchnera species, Budvicia species, Burkholderia species: Burkholderia cepacia (Pseudomonas cepacia), Burkholderia mallei (Pseudomonas mallei/Actinobacillus mallei), Burkholderia pseudomallei (Pseudomonas pseudomallei); Buttiauxella species, Calymmatobacterium granulomatis, Campylobacter species: Campylobacter coli, Campylobacter concisus, Campylobacter curvus, Campylobacter fetus, Campylobacter gracilis, Campylobacter helveticus, Campylobacter hominis, Campylobacter hyointestinalis, Campylobacter insulaenigrae, Campylobacter jejuni, Campylobacter lanienae, Campylobacter lari, Campylobacter mucosalis, Campylobacter rectus, Campylobacter showae, Campylobacter sputorum, Campylobacter upsaliensis; Capnocytophaga canimorsus (Dysgonic fermenter type 2), Corynebacterium species, Cardiobacterium hominis, Cedecea species, Chlamydia species: Chlamydia trachomatis (Lymphogranuloma venereum), Chlamydia muridarum, Chlamydia suis; Chlamydophila species: Chlamydophila pneumoniae, Chlamydophila psittaci (Psittacosis), Chlamydophila pecorum, Chlamydophila abortus, Chlamydophila felis, Chlamydophila caviae; Citrobacter species: Citrobacter amalonaticus, Citrobacter braakii, Citrobacter farmeri, Citrobacter freundii, Citrobacter gillenii, Citrobacter intermedius, Citrobacter koseri aka Citrobacter diversus, Citrobacter murliniae, Citrobacter rodentium, Citrobacter sedlakii, Citrobacter werkmanii, Citrobacter youngae; Clostridium species: Clostridium botulinum, Clostridium difficile, Clostridium novyi, Clostridium septicum, Clostridium tetani (Tetanus), Clostridium welchii (Clostridium perfringens); Corynebacterium species: Corynebacterium diphtheriae (Diphtheria), Corynebacterium amycolatum, Corynebacterium aquaticum, Corynebacterium bovis, Corynebacterium equi, Corynebacterium flavescens, Corynebacterium glutamicum, Corynebacterium haemolyticum, Corynebacterium jeikeiun (corynebacteria of group JK), Corynebacterium minutissimum (Erythrasma), Corynebacterium parvum (also called Propionibacterium acnes), Corynebacterium pseudodiptheriticum (also called Corynebacterium hofmannii), Corynebacterium pseudotuberculosis (also called Corynebacterium ovis), Corynebacterium pyogenes, Corynebacterium urealyticum (corynebacteria of group D2), Corynebacterium renale, Corynebacterium striatum, Corynebacterium tenuis (Trichomycosis palmellina, Trichomycosis axillaris), Corynebacterium ulcerans, Corynebacterium xerosis; Coxiella burnetii (Q fever), Cronobacter species: Cronobacter sakazakii, Cronobacter malonaticus, Cronobacter turicensis, Cronobacter muytjensii, Cronobacter dublinensis; Delftia acidovorans (Comamonas acidovorans), Dickeya species, Edwardsiella species, Eikenella corrodens, Enterobacter species: Enterobacter aerogenes, Enterobacter cloacae, Enterobacter sakazakii; Enterococcus species: Enterococcus avium, Enterococcus durans, Enterococcus faecalis (Streptococcus faecalis/Streptococcus Group D), Enterococcus faecium, Enterococcus solitarius, Enterococcus galllinarum, Enterococcus maloratus; Ehrlichia chaffeensis, Erysipelothrix rhusiopathiae, Erwinia species, Escherichia species: Escherichia adecarboxylata, Escherichia albertii, Escherichia blattae, Escherichia coli, Escherichia fergusonii, Escherichia hermannii, Escherichia vulneris; Ewingella species, Flavobacterium species: Flavobacterium aquatile, Flavobacterium branchiophilum, Flavobacterium columnare, Flavobacterium flevense, Flavobacterium gondwanense, Flavobacterium hydatis, Flavobacterium johnsoniae, Flavobacterium pectinovorum, Flavobacterium psychrophilum, Flavobacterium saccharophilum, Flavobacterium salegens, Flavobacterium scophthalmum, Flavobacterium succinans; Francisella tularensis (Tularaemia), Francisella novicida, Francisella philomiragia, Fusobacterium species: Fusobacterium necrophorum (Lemierre syndrome/Sphaerophorus necrophorus), Fusobacterium nucleatum, Fusobacterium polymorphum, Fusobacterium novum, Fusobacterium mortiferum, Fusobacterium varium; Gardnerella vaginalis, Gemella haemolysans, Gemella morbillorum (Streptococcus morbillorum), Grimontella species, Haemophilus species: Haemophilus aegyptius (Koch-Weeks bacillus), Haemophilus aphrophilus, Haemophilus avium, Haemophilus ducreyi (Chancroid), Haemophilus felis, Haemophilus haemolyticus, Haemophilus influenzae (Pfeiffer bacillus), Haemophilus paracuniculus, Haemophilus parahaemolyticus, Haemophilus parainfluenzae, Haemophilus paraphrophilus (Aggregatibacter aphrophilus), Haemophilus pertussis, Haemophilus pittmaniae, Haemophilus somnus, Haemophilus vaginalis; Hafnia species, Hafnia alvei, Helicobacter species: Helicobacter acinonychis, Helicobacter anseris, Helicobacter aurati, Helicobacter bilis, Helicobacter bizzozeronii, Helicobacter brantae, Helicobacter Canadensis, Helicobacter canis, Helicobacter cholecystus, Helicobacter cinaedi, Helicobacter cynogastricus, Helicobacter felis, Helicobacter fennelliae, Helicobacter ganmani, Helicobacter heilmannii (Gastrospirillum hominis), Helicobacter hepaticus, Helicobacter mesocricetorum, Helicobacter marmotae, Helicobacter muridarum, Helicobacter mustelae, Helicobacter pametensis, Helicobacter pullorum, Helicobacter pylori (stomach ulcer), Helicobacter rappini, Helicobacter rodentium, Helicobacter salomonis, Helicobacter trogontum, Helicobacter typhlonius, Helicobacter winghamensis; Human granulocytic ehrlichiosis (Anaplasma phagocytophilum/Ehrlichia phagocytophila), Human monocytotropic ehrlichiosis (Monocytic ehrlichiosis/Ehrlichia chaffeensis), Klebsiella species: Klebsiella granulomatis (Calymmatobacterium granulomatis), Klebsiella mobilis, Klebsiella ornithinolytica, Klebsiella oxytoca, Klebsiella ozaenae, Klebsiella planticola, Klebsiella pneumoniae, Klebsiella rhinoscleromatis, Klebsiella singaporensis, Klebsiella terrigena, Klebsiella trevisanii, Klebsiella variicola; Kingella kingae, Kluyvera species, Lactobacillus species: Lactobacillus acetotolerans, Lactobacillus acidifarinae, Lactobacillus acidipiscis, Lactobacillus acidophilus (Doderlein bacillus), Lactobacillus agilis, Lactobacillus algidus, Lactobacillus alimentarius, Lactobacillus amylolyticus, Lactobacillus amylophilus, Lactobacillus amylotrophicus, Lactobacillus amylovorus, Lactobacillus animalis, Lactobacillus antri, Lactobacillus apodemi, Lactobacillus aviarius, Lactobacillus bifermentans, Lactobacillus brevis, Lactobacillus buchneri, Lactobacillus camelliae, Lactobacillus casei, Lactobacillus catenaformis, Lactobacillus ceti, Lactobacillus coleohominis, Lactobacillus collinoides, Lactobacillus composti, Lactobacillus concavus, Lactobacillus coryniformis, Lactobacillus crispatus, Lactobacillus crustorum, Lactobacillus curvatus, Lactobacillus delbrueckii, Lactobacillus delbrueckii subsp. Bulgaricus, Lactobacillus delbrueckii subsp. Lactis, Lactobacillus diolivorans, Lactobacillus equi, Lactobacillus equigenerosi, Lactobacillus farraginis, Lactobacillus farciminis, Lactobacillus fermentum, Lactobacillus formicalis, Lactobacillus fructivorans, Lactobacillus frumenti, Lactobacillus fuchuensis, Lactobacillus gallinarum, Lactobacillus gasseri, Lactobacillus gastricus, Lactobacillus ghanensis, Lactobacillus graminis, Lactobacillus hammesii, Lactobacillus hamsteri, Lactobacillus harbinensis, Lactobacillus hayakitensis, Lactobacillus helveticus, Lactobacillus hilgardii, Lactobacillus homohiochii, Lactobacillus iners, Lactobacillus ingluviei, Lactobacillus intestinalis, Lactobacillus jensenii, Lactobacillus johnsonii, Lactobacillus kalixensis, Lactobacillus kefuranofaciens, Lactobacillus kefiri, Lactobacillus kimchii, Lactobacillus kitasatonis, Lactobacillus kunkeei, Lactobacillus leichmannii, Lactobacillus lindneri, Lactobacillus malefermentans, Lactobacillus mali, Lactobacillus manihotivorans, Lactobacillus mindensis, Lactobacillus mucosae, Lactobacillus murinus, Lactobacillus nagelii, Lactobacillus namurensis, Lactobacillus nantensis, Lactobacillus oligofermentans, Lactobacillus oris, Lactobacillus panis, Lactobacillus pantheris, Lactobacillus parabrevis, Lactobacillus parabuchneri, Lactobacillus paracollinoides, Lactobacillus parafarraginis, Lactobacillus parakefiri, Lactobacillus paralimentarius, Lactobacillus paraplantarum, Lactobacillus pentosus, Lactobacillus perolens, Lactobacillus plantarum, Lactobacillus pontis, Lactobacillus psittaci, Lactobacillus rennini, Lactobacillus reuteri, Lactobacillus rhamnosus, Lactobacillus rimae, Lactobacillus rogosae, Lactobacillus rossiae, Lactobacillus ruminis, Lactobacillus saerimneri, Lactobacillus sakei, Lactobacillus salivarius, Lactobacillus sanfranciscensis, Lactobacillus satsumensis, Lactobacillus secaliphilus, Lactobacillus sharpeae, Lactobacillus siliginis, Lactobacillus spicheri, Lactobacillus suebicus, Lactobacillus thailandensis, Lactobacillus ultunensis, Lactobacillus vaccinostercus, Lactobacillus vaginalis, Lactobacillus versmoldensis, Lactobacillus vini, Lactobacillus vitulinus, Lactobacillus zeae, Lactobacillus zymae; Leclercia species, Legionella species: Legionella adelaidensis, Legionella anisa, Legionella beliardensis, Legionella birminghamensis, Legionella bozemanii, Legionella brunensis, Legionella busanensis, Legionella cherrii, Legionella cincinnatiensis, Legionella donaldsonii, Legionella drancourtii, Legionella drozanskii, Legionella erythra, Legionella fairfieldensis, Legionella fallonii, Legionella feeleii, Legionella geestiana, Legionella genomospecies, Legionella gratiana, Legionella gresilensis, Legionella hackeliae, Legionella impletisoli, Legionella israelensis, Legionella jamestowniensis, ‘Candidatus Legionella jeonii’, Legionella jordanis, Legionella lansingensis, Legionella londiniensis, Legionella longbeachae, Legionella lytica, Legionella maceachernii, Legionella micdadei, Legionella moravica, Legionella nautarum, Legionella oakridgensis, Legionella parisiensis, Legionella pneumophila, Legionella quateirensis, Legionella quinlivanii, Legionella rowbothamii, Legionella rubrilucens, Legionella sainthelensi, Legionella santicrucis, Legionella shakespearei, Legionella spiritensis, Legionella steigerwaltii, Legionella taurinensis, Legionella tucsonensis, Legionella wadsworthii, Legionella waltersii, Legionella worsleiensis, Legionella yabuuchiae; Leminorella species, Leptospira species: Leptospira interrogans, Leptospira kirschneri, Leptospira noguchii, Leptospira alexanderi, Leptospira weilii, Leptospira genomospecies 1, Leptospira borgpetersenii, Leptospira santarosai, Leptospira inadai, Leptospira fainei, Leptospira broomii, eptospira licerasiae, Leptospira biflexa, Leptospira meyeri, Leptospira wolbachii, Leptospira genomospecies 3, Leptospira genomospecies 4, Leptospira genomospecies 5; Lepromatous leprosy (Danielssen-Boeck disease), Leptospira canicola, Leptospira hebdomadis, Leptospirosis (Weil disease/Leptospira icterohaemorrhagiae/Leptospira interrogans serovar icterohaemorrhagiae), Leptotrichia, Leuconostoc species: Leuconostoc carnosum, Leuconostoc citreum, Leuconostoc durionis, Leuconostoc fallax, Leuconostoc ficulneum, Leuconostoc fructosum, Leuconostoc garlicum, Leuconostoc gasicomitatum, Leuconostoc gelidum, Leuconostoc inhae, Leuconostoc kimchii, Leuconostoc lactis, Leuconostoc mesenteroides, Leuconostoc pseudoficulneum, Leuconostoc pseudomesenteroides; Listeria species: Listeria grayi, Listeria innocua, Listeria ivanovii, Listeria monocytogenes (Listeriosis), Listeria seeligeri, Listeria welshimeri; Methanobacterium extroquens, Microbacterium multiforme, Micrococcus species: Micrococcus antarcticus, Micrococcus flavus, Micrococcus luteus, Micrococcus lylae, Micrococcus mucilaginosis, Micrococcus roseus, Micrococcus sedentarius; Mobiluncus, Moellerella species, Morganella species, Moraxella species: Moraxella atlantae, Moraxella boevrei, Moraxella bovis, Moraxella canis, Moraxella caprae, Moraxella catarrhalis (Branhamella catarrhalis), Moraxella caviae, Moraxella cuniculi, Moraxella equi, Moraxella lacunata, Moraxella lincolnii, Moraxella nonliquefaciens, Moraxella oblonga, Moraxella osloensis, Moraxella saccharolytica; Morganella morganii, Mycobacterium species: Mycobacterium abscessus, Mycobacterium africanum, Mycobacterium agri, Mycobacterium aichiense, Mycobacterium alvei, Mycobacterium arupense, Mycobacterium asiaticum, Mycobacterium aubagnense, Mycobacterium aurum, Mycobacterium austroafricanum, Mycobacterium avium (Battey disease/Lady Windermere syndrome), Mycobacterium avium paratuberculosis (implicated in Crohn's disease in humans and Johne's disease in sheep), Mycobacterium avium silvaticum, Mycobacterium avium “hominissuis”, Mycobacterium colombiense, Mycobacterium boenickei, Mycobacterium bohemicum, Mycobacterium bolletii, Mycobacterium botniense, Mycobacterium bovis (Bovine tuberculosis), Mycobacterium branderi, Mycobacterium brisbanense, Mycobacterium brumae, Mycobacterium canariasense, Mycobacterium caprae, Mycobacterium celatum, Mycobacterium chelonae, Mycobacterium chimaera, Mycobacterium chitae, Mycobacterium chlorophenolicum, Mycobacterium chubuense, Mycobacterium conceptionense, Mycobacterium confluentis, Mycobacterium conspicuum, Mycobacterium cookii, Mycobacterium cosmeticum, Mycobacterium diernhoferi, Mycobacterium doricum, Mycobacterium duvalii, Mycobacterium elephantis, Mycobacterium fallax, Mycobacterium farcinogenes, Mycobacterium flavescens, Mycobacterium florentinum, Mycobacterium fluoroanthenivorans, Mycobacterium fortuitum, Mycobacterium fortuitum subsp. Acetamidolyticum, Mycobacterium frederiksbergense, Mycobacterium gadium, Mycobacterium gastri, Mycobacterium genavense, Mycobacterium gilvum, Mycobacterium goodii, Mycobacterium gordonae (Mycobacterium aquae), Mycobacterium haemophilum, Mycobacterium hassiacum, Mycobacterium heckeshornense, Mycobacterium heidelbergense, Mycobacterium hiberniae, Mycobacterium hodleri, Mycobacterium holsaticum, Mycobacterium houstonense, Mycobacterium immunogenum, Mycobacterium interjectum, Mycobacterium intermedium, Mycobacterium intracellulare, Mycobacterium kansasii, Mycobacterium komossense, Mycobacterium kubicae, Mycobacterium kumamotonense, Mycobacterium lacus, Mycobacterium lentiflavum, Mycobacterium leprae (causes leprosy or Hansen disease/Hanseniasis), Mycobacterium lepraemurium, Mycobacterium madagascariense, Mycobacterium mageritense, Mycobacterium malmoense, Mycobacterium marinum (Fish tank granuloma), Mycobacterium massiliense, Mycobacterium microti, Mycobacterium monacense, Mycobacterium montefiorense, Mycobacterium moriokaense, Mycobacterium mucogenicum, Mycobacterium murale, Mycobacterium nebraskense, Mycobacterium neoaurum, Mycobacterium neworleansense, Mycobacterium nonchromogenicum, Mycobacterium novocastrense, Mycobacterium obuense, Mycobacterium palustre, Mycobacterium parafortuitum, Mycobacterium parascrofulaceum, Mycobacterium parmense, Mycobacterium peregrinum, Mycobacterium phlei, Mycobacterium phocaicum, Mycobacterium pinnipedii, Mycobacterium porcinum, Mycobacterium poriferae, Mycobacterium pseudoshottsii, Mycobacterium pulveris, Mycobacterium psychrotolerans, Mycobacterium pyrenivorans, Mycobacterium rhodesiae, Mycobacterium saskatchewanense, Mycobacterium scrofulaceum, Mycobacterium senegalense, Mycobacterium seoulense, Mycobacterium septicum, Mycobacterium shimoidei, Mycobacterium shottsii, Mycobacterium simiae, Mycobacterium smegmatis, Mycobacterium sphagni, Mycobacterium szulgai, Mycobacterium terrae, Mycobacterium thermoresistibile, Mycobacterium tokaiense, Mycobacterium triplex, Mycobacterium triviale, Mycobacterium tuberculosis (major cause of human tuberculosis), Mycobacterium bovis, Mycobacterium africanum, Mycobacterium canetti, Mycobacterium caprae, Mycobacterium pinnipedii', Mycobacterium tusciae, Mycobacterium ulcerans (causes Bairnsdale ulcer/Buruli ulcer), Mycobacterium vaccae, Mycobacterium vanbaalenii, Mycobacterium wolinskyi, Mycobacterium xenopi; Mycoplasma species: Mycoplasma fermentans, Mycoplasma genitalium, Mycoplasma hominis, Mycoplasma penetrans, Mycoplasma phocacerebrale, Mycoplasma pneumoniae, Nanukayami (Seven-day fever/Gikiyami), Neisseria species: Neisseria gonorrhoea (Gonococcus/Gonorrhea), Neisseria meningiditis (Meningococcus), Neisseria sicca, Neisseria cinerea, Neisseria elongata, Neisseria flavescens, Neisseria lactamica, Neisseria mucosa, Neisseria polysaccharea, Neisseria subflava; Nitrobacter species, Nocardia species: Nocardia asteroides, Nocardia brasiliensis, Nocardia caviae; Noma (cancrum oris/gangrenous stomatitis), Obesumbacterium, Oligotropha species, Orientia tsutsugamushi (Scrub typhus), Oxalobacter formigenes, Pantoea species: Pantoea agglomerans, Pantoea ananatis, Pantoea citrea, Pantoea dispersa, Pantoea punctata, Pantoea stewartii, Pantoea terrea; Pasteurella species: Pasteurella aerogenes, Pasteurella anatis, Pasteurella avium, Pasteurella bettyae, Pasteurella caballi, Pasteurella canis, Pasteurella dagmatis, Pasteurella gallicida, Pasteurella gallinarum, Pasteurella granulomatis, Pasteurella langaaensis, Pasteurella lymphangitidis, Pasteurella mairii, Pasteurella multocida, Pasteurella pneumotropica, Pasteurella skyensis, Pasteurella stomatis, Pasteurella testudinis, Pasteurella trehalosi, Pasteurella tularensis, Pasteurella ureae, Pasteurella volantium; Pediococcus species: Pediococcus acidilactici, Pediococcus cellicola, Pediococcus claussenii, Pediococcus damnosus, Pediococcus dextrinicus, Pediococcus ethanolidurans, Pediococcus inopinatus, Pediococcus parvulus, Pediococcus pentosaceus, Pediococcus stilesii; Peptostreptococcus species: Peptostreptococcus anaerobius, Peptostreptococcus asaccharolyticus, Peptostreptococcus harei, Peptostreptococcus hydrogenalis, Peptostreptococcus indoliticus, Peptostreptococcus ivorii, Peptostreptococcus lacrimalis, Peptostreptococcus lactolyticus, Peptostreptococcus magnus, Peptostreptococcus micros, Peptostreptococcus octavius, Peptostreptococcus prevotii, Peptostreptococcus tetradius, Peptostreptococcus vaginalis; Photorhabdus species, Photorhizobium species, Plesiomonas shigelloides, Porphyromonas gingivalis, Pragia species, Prevotella, Propionibacterium species: Propionibacterium acnes, Propionibacterium propionicus; Proteus species: Proteus mirabilis, Proteus morganii, Proteus penneri, Proteus rettgeri, Proteus vulgaris; Providencia species: Providencia friedericiana, Providencia stuartii; Pseudomonas species: Pseudomonas aeruginosa, Pseudomonas alcaligenes, Pseudomonas anguilliseptica, Pseudomonas argentinensis, Pseudomonas borbori, Pseudomonas citronellolis, Pseudomonas flavescens, Pseudomonas mendocina, Pseudomonas nitroreducens, Pseudomonas oleovorans, Pseudomonas pseudoalcaligenes, Pseudomonas resinovorans, Pseudomonas straminea, Pseudomonas aurantiaca, Pseudomonas aureofaciens, Pseudomonas chlororaphis, Pseudomonas fragi, Pseudomonas lundensis, Pseudomonas taetrolens, Pseudomonas Antarctica, Pseudomonas azotoformans, Pseudomonas brassicacearum, Pseudomonas brenneri, Pseudomonas cedrina, Pseudomonas corrugate, Pseudomonas fluorescens, Pseudomonas gessardii, Pseudomonas libanensis, Pseudomonas mandelii, Pseudomonas marginalis, Pseudomonas mediterranea, Pseudomonas meridiana, Pseudomonas migulae, Pseudomonas mucidolens, Pseudomonas orientalis, Pseudomonas panacis, Pseudomonas proteolytica, Pseudomonas rhodesiae, Pseudomonas synxantha, Pseudomonas thivervalensis, Pseudomonas tolaasii, Pseudomonas veronii, Pseudomonas denitrificans, Pseudomonas pertucinogena, Pseudomonas cremoricolorata, Pseudomonas fulva, Pseudomonas monteilii, Pseudomonas mosselii, Pseudomonas oryzihabitans, Pseudomonas parafulva, Pseudomonas plecoglossicida, Pseudomonas putida, Pseudomonas balearica, Pseudomonas luteola, Pseudomonas stutzeri, Pseudomonas amygdale, Pseudomonas avellanae, Pseudomonas caricapapayae, Pseudomonas cichorii, Pseudomonas coronafaciens, Pseudomonas ficuserectae, Pseudomonas meliae, Pseudomonas savastanoi, Pseudomonas syringae, Pseudomonas viridiflava, Pseudomonas abietaniphila, Pseudomonas acidophila, Pseudomonas agarici, Pseudomonas alcaliphila, Pseudomonas alkanolytica, Pseudomonas amyloderamosa, Pseudomonas asplenii, Pseudomonas azotifigens, Pseudomonas cannabina, Pseudomonas coenobios, Pseudomonas congelans, Pseudomonas costantinii, Pseudomonas cruciviae, Pseudomonas delhiensis, Pseudomonas excibis, Pseudomonas extremorientalis, Pseudomonas frederiksbergensis, Pseudomonas fuscovaginae, Pseudomonas gelidicola, Pseudomonas grimontii, Pseudomonas indica, Pseudomonas jessenii, Pseudomonas jinjuensis, Pseudomonas kilonensis, Pseudomonas knackmussii, Pseudomonas koreensis, Pseudomonas lini, Pseudomonas lutea, Pseudomonas moraviensis, Pseudomonas otitidis, Pseudomonas pachastrellae, Pseudomonas palleroniana, Pseudomonas papaveris, Pseudomonas peli, Pseudomonas perolens, Pseudomonas poae, Pseudomonas pohangensis, Pseudomonas psychrophila, Pseudomonas psychrotolerans, Pseudomonas rathonis, Pseudomonas reptilivora, Pseudomonas resiniphila, Pseudomonas rhizosphaerae, Pseudomonas rubescens, Pseudomonas salomonii, Pseudomonas segitis, Pseudomonas septica, Pseudomonas simiae, Pseudomonas suis, Pseudomonas thermotolerans, Pseudomonas tremae, Pseudomonas trivialis, Pseudomonas turbinellae, Pseudomonas tuticorinensis, Pseudomonas umsongensis, Pseudomonas vancouverensis, Pseudomonas vranovensis, Pseudomonas xanthomarina; Rahnella species, Ralstonia species: Ralstonia basilensis, Ralstonia campinensis, Ralstonia eutropha, Ralstonia gilardii, Ralstonia insidiosa, Ralstonia mannitolilytica, Ralstonia metallidurans, Ralstonia paucula, Ralstonia pickettii, Ralstonia respiraculi, Ralstonia solanacearum, Ralstonia syzygii, Ralstonia taiwanensis; Raoultella species, Rhodoblastus species, Rhodopseudomonas species, Rhinoscleroma, Rhizobium radiobacter, Rhodococcus equi, Rickettsia species: Rickettsia africae, Rickettsia akari, Rickettsia australis, Rickettsia conorii, Rickettsia felis, Rickettsia japonica, Rickettsia mooseri, Rickettsia prowazekii (Typhus fever), Rickettsia rickettsii, Rickettsia siberica, Rickettsia typhi, Rickettsia conorii, Rickettsia africae, Rickettsia psittaci, Rickettsia quintana, Rickettsia rickettsii, Rickettsia trachomae; Rothia dentocariosa, Salmonella species: Salmonella arizonae, Salmonella Bongori, Salmonella enterica, Salmonella enteriditis, Salmonella paratyphi, Salmonella typhi (Typhoid fever), Salmonella typhimurium, Salmonella salamae, Salmonella arizonae, Salmonella diarizonae, Salmonella houtenae, Salmonella indica; Samsonia species, Serratia species: Serratia entomophila, Serratia ficaria, Serratia fonticola, Serratia grimesii, Serratia liquefaciens, Serratia marcescens, Serratia odoriferae, Serratia plymuthica, Serratia proteamaculans, Serratia quinivorans, Serratia rubidaea, Serratia ureilytica; Shewanella putrefaciens, Shigella boydii, Shigella dysenteriae, Shigella flexneri, Shigella sonnei, Sodalis species, Spirillum species: Spirillum minus rat bite fever, Staphylococcus species: Staphylococcus aureus, Staphylococcus auricularis, Staphylococcus capitis, Staphylococcus caprae, Staphylococcus cohnii, Staphylococcus epidermidis, Staphylococcus felis, Staphylococcus haemolyticus, Staphylococcus hominis, Staphylococcus intermedius, Staphylococcus lugdunensis, Staphylococcus pettenkoferi, Staphylococcus saprophyticus, Staphylococcus schleiferi, Staphylococcus simulans, Staphylococcus vitulus, Staphylococcus warneri, Staphylococcus xylosus; Stenotrophomonas species: Stenotrophomonas acidaminiphila, Stenotrophomonas dokdonensis, Stenotrophomonas koreensis, Stenotrophomonas maltophilia, Stenotrophomonas nitritireducens, Stenotrophomonas rhizophila; Streptobacillus species: Streptobacillus moniliformis (Streptobacillary rat bite fever); Streptococcus species: Streptococcus Group A, Streptococcus Group B, Streptococcus agalactiae, Streptococcus aginosus, Streptococcus avium, Streptococcus bovis, Streptococcus canis, Streptococcus cricetus, Streptococcus faceium, Streptococcus faecalis, Streptococcus ferus, Streptococcus gallinarum, Streptococcus lactis, Streptococcus milleri, Streptococcus mitior, Streptococcus mitis, Streptococcus mutans, Streptococcus oralis, Streptococcus peroris, Streptococcus pneumoniae, Streptococcus pyogenes, Streptococcus ratti, Streptococcus salivarius, Streptococcus sanguinis, Streptococcus sobrinus, Streptococcus parasanguinis, Streptococcus suis, Streptococcus thermophilus, Streptococcus vestibularis, Streptococcus viridans, Streptococcus uberis, Streptococcus zooepidemicus; Tatumella species, Trabulsiella species, Treponema species: Treponema carateum (Pinta), Treponema denticola, Treponema endemicum (Bejel), Treponema pallidum (Syphilis), Treponema pertenue (Yaws); Tropheryma whipplei (Whipple disease), Tuberculoid leprosy, Ureaplasma urealyticum, Veillonella, Vibrio species: Vibrio aerogenes, Vibrio aestuarianus, Vibrio agarivorans, Vibrio albensis, Vibrio alginolyticus, Vibrio brasiliensis, Vibrio calviensis, Vibrio campbellii, Vibrio chagasii, Vibrio cholerae (Cholera), Vibrio cincinnatiensis, Vibrio Comma, Vibrio coralliilyticus, Vibrio crassostreae, Vibrio cyclitrophicus, Vibrio diabolicus, Vibrio diazotrophicus, Vibrio ezurae, Vibrio fischeri, Vibrio fluvialis, Vibrio fortis, Vibrio furnissii, Vibrio gallicus, Vibrio gazogenes, Vibrio gigantis, Vibrio halioticoli, Vibrio harveyi, Vibrio hepatarius, Vibrio hispanicus, Vibrio ichthyoenteri, Vibrio kanaloae, Vibrio lentus, Vibrio litoralis, Vibrio logei, Vibrio mediterranei, Vibrio metschnikovii, Vibrio mimicus, Vibrio mytili, Vibrio natriegens, Vibrio navarrensis, Vibrio neonatus, Vibrio neptunius, Vibrio nereis, Vibrio nigripulchritudo, Vibrio ordalii, Vibrio orientalis, Vibrio pacinii, Vibrio parahaemolyticus, Vibrio pectenicida, Vibrio penaeicida, Vibrio pomeroyi, Vibrio ponticus, Vibrio proteolyticus, Vibrio rotiferianus, Vibrio ruber, Vibrio rumoiensis, Vibrio salmonicida, Vibrio scophthalmi, Vibrio splendidus, Vibrio superstes, Vibrio tapetis, Vibrio tasmaniensis, Vibrio tubiashii, Vibrio vulnificus, Vibrio wodanis, Vibrio xuii; Vogesella indigofera, Wigglesworthia species, Wolbachia species, Xenorhabdus species, Yersinia enterocolitica, Yersinia pestis, Yersinia pseudotuberculosis, and Yokenella species.

[2587] 1344. The method for vaccination according to item 1172, wherein the vaccination is for treatment of one or more infectious diseases.

[2588] 1345. The method for vaccination according to item 1344, wherein the one or more infectious diseases can be selected from the group consisting of Bacteria and bacterial diseases (Specific kind of Infections), Fungus and fungal infections (Specific kind of Infections), Helminths and helminthic conditions (Specific kind of Infections), Prions and prion related diseases (Specific kind of Infections), Protozoa and protozoal infections (Specific kind of Infections), Viruses and viral disease (Specific kind of Infections), Abscess, Acariasis, actinomycetoma, Adenitis, Adenoiditis, African trypanosomiasis, Alpers Syndrome, Alphos, Alveolar osteitis, Amebiasis, Anorectal abscess, Anthrax, Ascariasis, Aspergillosis, Athlete's foot, Atypical pneumonia, Babesiosis, Bejel, Blastocystis hominis, Blastomycosis, Bolivian hemorrhagic fever, Botulism, Botryomycosis, Borna disease, Borreliosis (Lyme disease), Bovine spongiform encephalopathy, Brazilian purpuric fever (BPF), Bronchiolitis, Brucellosis, Bubonic plague, Buruli ulcer, Candidiasis, Campylobacteriosis, Cat scratch fever, Cellulitis, Chagas disease, Chalazion, Chickenpox (Varicella), Chikungunya, Cholangitis, Cholecystitis, Cholera, Clonorchiasis, Coccidioidomycosis, Colorado Tick Fever (CTF), Common cold, Creutzfeldt-Jakob disease, Crimean-Congo hemorrhagic fever, Cryptococcosis, Cryptosporidiosis, Cutaneous abscess, Cysticercosis, Cystitis, infective, Dengue fever, Dermatophytosis, Diarrheal diseases, Diphteria, Diphyllobothriasis, Discitis, Donovanosis, Dracunculiasis, Dukes' disease, Dysentery, Ebola hemorrhagic fever, Echinococcosis, Encephalitis, Enterobiasis, Epidural abscess, Erysipelas, Eumycetoma, Fascioliasis, Fatal Familial Insomnia, Filariasis, Finger pulp abscess, Fitz-Hugh-Curtis syndrome, Foodborne trematodiases, Foot-and-mouth disease, Gallbladder empyema, Gas gangrene, Gastroenteritis, Giardiasis, Glanders, Gnathostomiasis, Gonorrhea, Gradenigo-Lannois syndrome, Grisel syndrome, Helminthiasis, Hepatitis, Herpes simplex, Herpes zoster, HPV, Histoplasmosis, HIV/AIDS, Hookworm, Hordeolum externum, Human African trypanosomiasis, Hymenolepiasis, Impetigo, Infectious mononucleosis, Influenza, Intertrigo, Intracranial abscess/granuloma, Intraspinal abscess/granuloma, Isosporiasis, IV catheter infection, Japanese Encephalitis, Kuru, Kyasanur forest disease, Labrea fever, La Crosse encephalitis, Lacrimal canaliculitis, Lady Windermere syndrome, Laryngeal papillomatosis, Laryngitis, Lassa fever, Legionellosis, Leishmaniasis, Lemierre's syndrome, Leptospirosis, Leprosy, Listeriosis, Liver abscess, Loa loa filariasis, lobomycosis, Lower respiratory tract infection, Ludwig angina, Lung abscess, Lymphangitis, Lymphatic filariasis, Malaria, Marburg haemorrhagic fever, Measles, Mediastinitis, Melioidosis, Meningitis, Metagonimiasis, Mumps, Murrain, Mycetoma, Mycosis, Myiasis, Necrotizing fasciitis, Neurocysticercosis, Nocardiosis, Omphalitis, Onchocerciasis, Ophthalmia neonatorum, Orbital cellulitis, Oropouche fever, Oroya fever, Osteomyelitis, Paragonimiasis, Paratyphoid fevers, Pediculosis, Periorbital cellulitis, Periodontis, Pertussis (Whooping Cough), Pharyngitis, Pharyngoconjunctival fever, Phlegmon, Pigbel (enteritis necroticans), Pinta, Pinworm Infection, Plantar wart, Pneumonia, Pneumonic plague, Pogosta disease, Poliomyelitis, Pott's disease, Prostatitis, Protothecosis, Psittacosis, Pyelonephritis acute, Pyelonephritis chronic, Pyomyositis, Q fever, Quinsy, Rabies, Rat-bite fever, Relapsing fever, Retropharyngeal abscess, Rheumatic Fever, Rhinosporidiosis, Rickettsialpox, Rift Valley fever, Ringworm, Rodentoleposis, Rocky Mountain Spotted Fever (RMSF), Roseola, Rubella, Salmonellosis, Scabies, Scarlet fever, Schistosomiasis, Septicemic plague, Septic arthropathy, Septic shock, Sepsis, Severe acute respiratory syndrome (SARS), Sexually transmissable disease, Shigellosis, Smallpox (Variola), Sodoku, Spondylodiskitis, Strongyloidiasis, Subdiaphragmatic abscess, Subdural empyema, Suppurative thyroiditis, Surra, Sweating sickness, Syphilis, Taeniasis, Tetanus, Trachoma, Tick-borne diseases, Tinea barbae, Tinea capitis, Tinea corporis, Tinea cruris, Tinea faciei, Tinea manuum, Tinea nigra, Tinea pedis, Tinea versicolor, Tonsillitis, Toxocariasis, Toxoplasmosis, Tracheolaryngobronchitis, Trachoma, Transmissible spongiform encephalopathy, Traveler's diarrhea, Trench fever, Treponematoses, Trichinellosis, Trichinosis, Trichomoniasis, Trichuriasis, Tropical diseases, Trypanosomiasis, Tuberculosis (TB), Tularemia, Typhoid fever, Typhus, Upper respiratory tract infection, Urethritis, Urinary tract infection, Venezuelan hemorrhagic fever (VHF), Verruca plana, viral hemorrhagic fevers (VHFs), Wart, West Nile disease, Wound infection, Yaws, Yellow fever, Yersiniosis and Zygomycosis.

[2589] 1346. The method for vaccination according to item 1172, wherein the vaccination is for treatment of one or more cancer diseases.

[2590] 1347. The method for vaccination according to item 1346, wherein the one or more cancer diseases can be selected from the group consisting of Acute Lymphoblastic Leukemia, Acute Myeloid Leukemia, Adrenocortical Carcinoma, AIDS-Related Cancers, AIDS-Related Lymphoma, Anal Cancer, Astrocytoma (e.g. Childhood Cerebellar or Childhood Cerebral), Basal Cell Carcinoma, Extrahepatic Bile Duct Cancer, Bladder Cancer, Bone Cancer, Osteosarcoma/Malignant Fibrous Histiocytoma, Brain Stem Glioma, Brain Tumor, Breast Cancer, Male Breast Cancer, Bronchial Adenomas/Carcinoids, Burkitt's Lymphoma, Carcinoid Tumor, Carcinoma of Unknown Primary, Primary Central Nervous System Lymphoma, Cerebral Astrocytoma/Malignant Glioma, Cervical Cancer, Childhood Cancers, Chronic Lymphocytic Leukemia, Chronic Myelogenous Leukemia, Chronic Myeloproliferative Disorders, Colon Cancer, Cutaneous T-Cell Lymphoma, Endometrial Cancer, Ependymoma (such as Childhood Ependymoma), Esophageal Cancer, Ewing's Family of Tumors, Extracranial Germ Cell Tumor (such as Childhood Extracranial Germ Cell Tumor), Extragonadal Germ Cell Tumor, Eye Cancer (Intraocular Melanoma or Retinoblastoma), Gallbladder Cancer, Gastric (Stomach) Cancer, Gastrointestinal Carcinoid Tumor, Gestational Trophoblastic Tumor, Glioma, Hairy Cell Leukemia, Head and Neck Cancer, Hepatocellular (Liver) Cancer, Hodgkin's Lymphoma, Hypopharyngeal Cancer, Hypothalamic and Visual Pathway Glioma (such as Childhood Hypothalamic and Visual Pathway Glioma), Intraocular Melanoma, Islet Cell Carcinoma (Endocrine Pancreas), Kaposi's Sarcoma, Kidney (Renal Cell) Cancer, Laryngeal Cancer, Lip and Oral Cavity Cancer, Lung Cancer (Non-Small Cell or Small Cell), Lymphoma (such as AIDS-Related Lymphoma, Burkitt's Lymphoma, Cutaneous T-Cell Lymphoma, Non-Hodgkin's Lymphoma), Macroglobulinemia (such as Waldenstrom's Macroglobulinemia), Malignant Fibrous Histiocytoma of Bone/Osteosarcoma, Medulloblastoma (such as Childhood Medulloblastoma), Melanoma, Merkel Cell Carcinoma, Mesothelioma (such as Adult Malignant Mesothelioma or childhood Mesothelioma), Metastatic Squamous Neck Cancer with Occult Primary, Multiple Endocrine Neoplasia Syndrome (such as occurring in childhood), Multiple Myeloma/Plasma Cell Neoplasm, Mycosis Fungoides, Myelodysplastic Syndromes, Myelodysplastic/Myeloproliferative Diseases, Myeloma (such as Multiple Myeloma), Chronic myeloproliferative disorders, Nasal Cavity and Paranasal Sinus Cancer, Nasopharyngeal Cancer, Nasopharyngeal Cancer (such as Childhood Nasopharyngeal Cancer), Neuroblastoma, Oropharyngeal Cancer, Osteosarcoma/Malignant Fibrous Histiocytoma of Bone, Ovarian Cancer (such as Childhood Ovarian Cancer), Ovarian Epithelial Cancer, Ovarian Germ Cell Tumor, Ovarian Low Malignant Potential Tumor, Pancreatic Cancer, Pancreatic Cancer, Paranasal Sinus and Nasal Cavity Cancer, Parathyroid Cancer, Penile Cancer, Pheochromocytoma, Pineoblastoma and Supratentorial Primitive Neuroectodermal Tumors, Pituitary Tumor, Pleuropulmonary Blastoma, Prostate Cancer, Renal Pelvis and Ureter Transitional Cell Cancer, Retinoblastoma, Rhabdomyosarcoma (such as Childhood Rhabdomyosarcoma), Salivary Gland Cancer, Adult-onset soft tissue Sarcoma, Soft Tissue Sarcoma (such as Childhood Soft Tissue Sarcoma), uterine Sarcoma, Sezary Syndrome, Skin Cancer (such as non-Melanoma skin cancer), Merkel Cell Skin Carcinoma, Small Intestine Cancer, Supratentorial Primitive Neuroectodermal Tumors (such as occurring in Childhood), Cutaneous T-Cell Lymphoma, Testicular Cancer, Thymoma and Thymic Carcinoma, Thyroid Cancer, Transitional Cell Cancer of the Renal Pelvis and Ureter, Trophoblastic Tumor (such as Gestational Trophoblastic Tumor), Urethral Cancer, Endometrial uterine cancer, Uterine Sarcoma, Vaginal Cancer, Visual Pathway and Hypothalamic Glioma (such as Childhood Visual Pathway and Hypothalamic Glioma), Waldenstrom's Macroglobulinemia and Wilms' Tumor.

[2591] 1348. The method for vaccination according to item 1172, wherein the vaccination is for treatment of one or more diseases selected from the group consisting of diseases of inflammatory, auto-immune, allergic, viral, cancerous, infectious, allo- or xenogene (graft versus host and host versus graft) origin.

[2592] 1349. The method for vaccination according to item 1172, wherein the vaccination is for treatment of one or more diseases selected from the group consisting of chronic inflammatory bowel disease such as Crohn's disease or ulcerative colitis, sclerosis, type I diabetes, rheumatoid arthritis, psoriasis, atopic dermatitis, asthma, malignant melanoma, renal carcinoma, breast cancer, lung cancer, cancer of the uterus, prostatic cancer, brain cancer, head and neck cancer, leukaemia, cutaneous lymphoma, hepatic carcinoma, colorectal cancer, bladder cancer, rejection-related disease, Graft-versus-host-related disease, or a viral disease associated with hepatitis, AIDS, measles, pox chicken pox, rubella or herpes.

[2593] 1350. The method for vaccination according to item 1172, wherein the vaccination is for treatment of one or more diseases selected from the group consisting of a disease of inflammatory/auto-immune origin, including asthma, hypersensitivity pneumonitis, interstitial lung disease, sarcoidosis, idiopathic pulmonary fibrosis, interstitial lung disease associated with Crohn s Disease or ulcerative colitis or Whipple's disease, interstitial lung disease associated with Wegeners granulomatosis or hypersensitivity vasculitis, vasculitis syndromes, Hennoch-Schonleins purpura, Goodpastures syndrome, Wegeners granulomatosis, renal diseases such as antibody mediated glomerulopathia as in acute glomerulonephritis, nephritis associated with systemic lupus erythematosus, nephritis associated with other systemic diseases such as Wegeners granulomatosis and Goodpastures syndrome and mixed connective tissue disease, chronic interstitial nephritis, chronic glomerulonephritis, gastrointestinal diseases such as Crohn s Disease, Ulcerative colitis, coeliac disease, Whipple's disease, collagenous colitis, eosinophilic colitis, lymphatic colitis, hepatobiliary diseases such as auto-immune hepatitis, alcohol induced hepatitis, periportal fibrosis, primary biliary cirrhosis, sclerosing cholangitis, disorders of the central or peripheral nervous system such as demyelinating disease as multiple sclerosis, acute disseminated encephalomyelitis, sub-acute sclerosing panencephalitis, skin disease such as psoriasis, atopic dermatitis, eczema, allergic skin disease, progressive systemic sclerosis (scleroderma), exfoliating dermatitis, pemphigus vulgaris, joint diseases such as rheumatoid arthritis, ankylosing spondylitis, arthritis associated with psoriasis or inflammatory bowel disease, muscoloskelletal diseases such as myasthenia gravis, polymyositis, endocrine diseases such as insulin dependent diabetes mellitus, auto-immune thyroiditis (Hashimoto), thyreotoxicosis, Graves, diseases of the hematopoetic system such as auto-immune anaemia, auto-immune thrombocytopenia, cardiovascular diseases such as cardiomyopathia, vasculitis, cardiovascular disease associated with systemic diseases as systemic lupus erythematosus, polyarthritis nodosa, rheumatoid arthritis, scleroderma, sarcoidosis, diseases of cancerous origin, including malignant melanoma, Sezary's syndrome, cutaneous T-cell lymphoma, renal cell carcinoma, colorectal cancer, breast cancer, ovarian cancer, cancer of the uterus, prostatic cancer, hepatic carcinoma, lung cancer, and sarcoma, and diseases, disorders or conditions of allergic origin.

[2594] 1351. The method for vaccination according to item 1172, wherein the vaccination is for treatment of one or more diseases selected from the group consisting of autoimmune diseases including multiple sclerosis, type I diabetes mellitus, Hashimotos thyroiditis, pernicious anemia, Addison's disease, myasthenia gravis, rheumatoid arthritis, uveitis, psoriasis, Guillain-Barre Syndrome and Grave's disease, systemic lupus erythematosus and dermatomyositis.

[2595] 1352. The method for vaccination according to item 1172, wherein the vaccination is for treatment of one or more diseases selected from the group consisting of hypersensitivity disorders like asthma, eczema, atopical dermatitis, contact dermatitis, other eczematous dermatitides, seborrheic dermatitis, rhinitis, Lichen planus, Pemplugus, bullous Pemphigoid, Epidermolysis bullosa, uritcaris, angioedemas, vasculitides, erythemas, cutaneous eosinophilias, Alopecia greata, atherosclerosis, primary biliary cirrhosis and nephrotic syndrome.

[2596] 1353. The method for vaccination according to item 1172, wherein the vaccination is for treatment of one or more diseases selected from the group consisting of intestinal inflammations, such as Coeliac disease, proctitis, eosinophilia gastroenteritis, mastocytosis, inflammatory bowel disease, Chrohn's disease and ulcerative colitis, as well as food-related allergies.

[2597] 1354. The method for vaccination according to item 1172, wherein the vaccination is for treatment of one or more allergic diseases.

[2598] 1355. The method for vaccination according to item 1354, wherein the allergic diseases involve one or more of the allergens selected from the group consisting of inhalation allergens originating i. a. from trees, grasses, herbs, fungi, house dust mites, storage mites, cockroaches and animal hair, feathers, and dandruff, pollen allergens from trees, grasses and herbs are such originating from the taxonomic orders of Fagales, Oleales and Pinales including i. a. birch (Betula), alder (Alnus), hazel (Corylus), hornbeam (Carpinus) and olive (Olea), the order of Poales including i. a. grasses of the genera Lolium, Phleum, Poa, Cynodon, Dactylis and Secale, the orders of Astrales and Urticales including i. a. herbs of the genera Ambrosia and Artemisia, inhalation allergens from fungi, allergens originating from the genera Alternaria and Cladosporium, inhalation allergens from house dust mites of the genus Dermatophagoides, storage mites from the genus Lepidoglyphys destructor, those from cockroaches and those from mammals such as cat, dog, horse, cow, and bird.

[2599] 1356. The method for vaccination according to item 1172, wherein the vaccination is for treatment of one or more diseases selected from the group consisting of Bet v 1 (B. verrucosa, birch), Aln g 1 (Alnus glutinosa, alder), Cor a 1 (Corylus avelana, hazel) and Car b 1 (Carpinus betulus, hornbeam) of the Fagales order, Cry j 1 (Pinales), Amb a 1 and 2, Art v 1 (Asterales), Par j 1 (Urticales), Ole e 1 (Oleaves), Ave e 1, Cyn d 1, Dac g 1, Fes p 1, Hol 1 1, Lol p 1 and 5, Pas n 1, Phl p 1 and 5, Poa p 1, 2 and 5, Sec c 1 and 5, and Sor h 1 (various grass pollens), Alt a 1 and Cla h 1 (fungi), Der f 1 and 2, Der p 1 and 2 (house dust mites, D. farinae and D. pteronyssinus, respectively), Lep d 1, Bla g 1 and 2, Per a 1 (cockroaches, Blatella germanica and Periplaneta americana, respectively), Fel d 1 (cat), Can f 1 (dog), Equ c 1, 2 and 3 (horse), Apis m 1 and 2 (honeybee), Ves g 1, 2 and 5, Pol a 1, 2 and 5 (all wasps) and Sol i 1, 2, 3 and 4 (fire ant).

[2600] 1357. The method for vaccination according to item 1172, wherein the vaccination results in up-regulation of the immune response of said individual.

[2601] 1358. The method for vaccination according to item 1172, wherein the vaccination results in down-regulation of the immune response of said individual.

[2602] 1359. The method for vaccination according to item 1172, wherein the vaccination results in modulation of the immune response of said individual.

[2603] 1360. The method for vaccination according to item 1172, wherein the vaccination results in stimulation of the immune response of said individual.

[2604] 1361. The method for vaccination according to item 1172, wherein the vaccination results in inhibition of the immune response of said individual.

[2605] 1362. The method for vaccination according to item 1172, wherein the vaccination results in restoration of the immune response of said individual.

[2606] 1363. The method for vaccination according to item 1172, wherein the vaccination results in induction of anergy in a cell.

[2607] 1364. The method for vaccination according to item 1172, wherein the vaccination results in adoptive immunotherapy.

[2608] 1365. The method for vaccination according to item 1172, wherein the vaccination comprises in vivo therapy and/or ex vivo therapy.

[2609] 1366. The method for vaccination according to item 1172, wherein the vaccination comprises combination therapy such as co-administration of the composition according to item 1-1170 and one or more medicaments.

[2610] 1367. The method for vaccination according to item 1366, wherein the co-administration comprises that the composition according to item 1-1170 and the one or more medicaments can be administered simultaneously.

[2611] 1368. The method for vaccination according to item 1366, wherein the co-administration comprises that the composition according to item 1-1170 and the one or more medicaments can be administered sequentially in any order.

[2612] 1369. The method for vaccination according to item 1366, wherein the one or more medicaments can be an anti-cancer medicament.

[2613] 1370. The method for vaccination according to item 1366, wherein the one or more medicaments can be an anti-cancer drug selected from the group consisting of

[2614] 1371. The method for vaccination according to item 1366, wherein the one or more medicaments can be an anti-HIV medicament.

[2615] 1372. The method for vaccination according to item 1366, wherein the one or more medicaments can be a chemotherapeutic agent.

[2616] 1373. The method for vaccination according to item 1366, wherein the one or more medicaments can be an immunotherapeutic agent.

[2617] 1374. The method for vaccination according to item 1366, wherein the combination therapy comprises radiation therapy.

[2618] 1375. The method for vaccination according to item 1366, wherein the combination therapy comprises gene therapy.

[2619] 1376. The method for vaccination according to item 1366, wherein the combination therapy comprises surgery.

[2620] 1377. The method for vaccination according to item 1366, wherein the one or more medicaments can be selected from the group of chemotherapeutic agents including methotrexate, vincristine, adriamycin, cisplatin, non-sugar containing chloroethylnitrosoureas, 5-fluorouracil, mitomycin C, bleomycin, doxorubicin, dacarbazine, taxol, fragyline, Meglamine GLA, valrubicin, carmustaine and poliferposan, MM1270, BAY 12-9566, RAS farnesyl transferase inhibitor, farnesyl transferase inhibitor, MMP, MTA/LY231514, LY264618/Lometexol, Glamolec, CI-994, TNP-470, Hycamtin/Topotecan, PKC412, Valspodar/PSC833, Novantrone/Mitroxantrone, Metaret/Suramin, Batimastat, E7070, BCH-4556, CS-682, 9-AC, AG3340, AG3433, Incel/VX-710, VX-853, ZD0101, ISI1641, ODN 698, TA 2516/Marmistat, BB2516/Marmistat, CDP 845, D2163, PD183805, DX8951f, Lemonal DP 2202, FK 317, Picibanil/OK-432, AD 32/Valrubicin, Metastron/strontium derivative, Temodal/Temozolomide, Evacet/liposomal doxorubicin, Yewtaxan/Placlitaxel, Taxol/Paclitaxel, Xeload/Capecitabine, Furtulon/Doxifluridine, Cyclopax/oral paclitaxel, Oral Taxoid, SPU-077/Cisplatin, HMR 1275/Flavopiridol, CP-358 (774)/EGFR, CP-609 (754)/RAS oncogene inhibitor, BMS-182751/oral platinum, UFT (Tegafur/Uracil), Ergamisol/Levamisole, Eniluracil/776C85/5FU enhancer, Campto/Levamisole, Camptosar/Irinotecan, Tumodex/Ralitrexed, Leustatin/Cladribine, Paxex/Paclitaxel, Doxil/liposomal doxorubicin, Caelyx/liposomal doxorubicin, Fludara/Fludarabine, Pharmarubicin/Epirubicin, DepoCyt, ZD1839, LU 79553/Bis-Naphtalimide, LU 103793/Dolastain, Caetyx/liposomal doxorubicin, Gemzar/Gemcitabine, ZD 0473/Anormed, YM 116, Iodine seeds, CDK4 and CDK2 inhibitors, PARP inhibitors, D4809/Dexifosamide, Ifes/Mesnex/Ifosamide, Vumon/Teniposide, Paraplatin/Carboplatin, Plantinol/cisplatin, Vepeside/Etoposide, ZD 9331, Taxotere/Docetaxel, prodrug of guanine arabinoside, Taxane Analog, nitrosoureas, alkylating agents such as melphelan and cyclophosphamide, Aminoglutethimide, Asparaginase, Busulfan, Carboplatin, Chlorombucil, Cytarabine HCl, Dactinomycin, Daunorubicin HCl, Estramustine phosphate sodium, Etoposide (VP16-213), Floxuridine, Fluorouracil (5-FU), Flutamide, Hydroxyurea (hydroxycarbamide), Ifosfamide, Interferon Alfa-2a, Alfa-2b, Leuprolide acetate (LHRH-releasing factor analogue), Lomustine (CCNU), Mechlorethamine HCl (nitrogen mustard), Mercaptopurine, Mesna, Mitotane (o.p′-DDD), Mitoxantrone HCl, Octreotide, Plicamycin, Procarbazine HCl, Streptozocin, Tamoxifen citrate, Thioguanine, Thiotepa, Vinblastine sulfate, Amsacrine (m-AMSA), Azacitidine, Erthropoietin, Hexamethylmelamine (HMM), Interleukin 2, Mitoguazone (methyl-GAG; methyl glyoxal bis-guanylhydrazone; MGBG), Pentostatin (2′deoxycoformycin), Semustine (methyl-CCNU), Teniposide (VM-26) and Vindesine sulfate.

[2621] 1378. The method for vaccination according to item 1366, wherein the one or more medicaments can be selected from the group of anti-cancer drugs consisting of Aldesleukin/Proleukin (Chiron Corp), Alemtuzumab/Campath (Millennium and ILEX Partners, LP), alitretinoin/Panretin (Ligand Pharmaceuticals), allopurinol/Zyloprim (GlaxoSmithKline), altretamine/Hexylen (US Bioscience), amifostine/Ethyol (US Bioscience), anastrozole/Arimidex (AstraZeneca), arsenic trioxide/Trisenox (Cell Therapeutic), Asparaginase/Elspar (Merck & Co, Inc), BCG Live/TICE BCG (Organon Teknika Corp), bexarotene capsules/Targretin (Ligand Pharmaceuticals), bleomycin/Blenoxane (Bristol-Myers Squibb), busulfan/Busulfex (GlaxoSmithKline), calusterone/Methosarb (Pharmacia & Upjohn Company), capecitabine/Xeloda (Roche), carboplatin/Paraplatin (Bristol-Myers Squibb), carmustine/BCNU, BiCNU (Bristol-Myers Squibb), carmustine with Polifeprosan 20 Implant/Gliadel Wafer (Guilford Pharmaceuticals Inc.), celecoxib/Celebrex (Searle), chlorambucil/Leukeran (GlaxoSmithKline), cisplatin/Platinol (Bristol-Myers Squibb), cladribine/Leustatin, 2-CdA (R.W. Johnson Pharmaceutical Research Institute), cyclophosphamide Cytoxan/Neosar (Bristol-Myers Squibb), cytarabine/Cytosar-U (Pharmacia & Upjohn Company), dacarbazine/DTIC-Dome (Bayer), dactinomycin/actinomycin D Cosmegen (Merck), Darbepoetin alfa/Aranesp (Amgen, Inc), daunorubicin/daunomycin/Daunorubicin (Bedford Labs), daunorubicin/daunomycin/Cerubidine (Wyeth Ayerst), Denileukin/diftitox/Ontak (Seragen, Inc), dexrazoxane/Zinecard (Pharmacia & Upjohn Company), docetaxel/Taxotere (Aventis Pharmaceutical), doxorubicin Adriamycin/Rubex (Pharmacia & Upjohn Company), DROMOSTANOLONE PROPIONATE/MASTERONE INJECTION(SYNTEX), Elliott's B Solution (Orphan Medical, Inc), epirubicin/Ellence (Pharmacia & Upjohn Company), etoposide phosphate (Bristol-Myers Squibb), etoposide/VP-16/Vepesid (Bristol-Myers Squibb), exemestane/Aromasin (Pharmacia & Upjohn Company), Filgrastim/Neupogen (Amgen, Inc), floxuridine/FUDR (Roche), fludarabine/Fludara (Berlex Laboratories Inc.), fluorouracil/5-FU/Adrucil (ICN Puerto Rico), fulvestrant/Faslodex (IPR), gemcitabine/Gemzar (Eli Lilly), gemtuzumab/ozogamicin/Mylotarg (Wyeth Ayerst), goserelin acetate/Zoladex Implant (AstraZeneca Pharmaceuticals), hydroxyurea/Hydrea (Bristol-Myers Squibb), Ibritumomab Tiuxetan/Zevalin (IDEC Pharmaceuticals Corp), idarubicin/Idamycin (Adria Laboratories), ifosfamide/IFEX (Bristol-Myers Squibb), imatinib mesylate/Gleevec (Novartis), Interferon alfa-2a/Roferon-A (Hoffmann-La Roche Inc), Interferon alfa-2b/Intron A (Schering Corp), irinotecan/Camptosar (Pharmacia & Upjohn Company), letrozole/Femara (Novartis), leucovorin Wellcovorin/Leucovorin (Immunex Corporation), levamisole/Ergamisol (Janssen Research Foundation), lomustine/CCNU/CeeBU (Bristol-Myers Squibb), mechlorethamine/nitrogen mustard/Mustargen (Merck), megestrol acetate/Megace (Bristol-Myers Squibb), melphalan/L-PAM/Alkeran (GlaxoSmithKline), mercaptopurine/6-MP Purinethol (GlaxoSmithKline), mesna/Mesnex (Asta Medica), methotrexate (Lederle Laboratories), methoxsalen/Uvadex (Therakos), mitomycin C/Mutamycin (Bristol-Myers Squibb), mitomycin C/Mitozytrex (Supergen), mitotane/Lysodren (Bristol-Myers Squibb), mitoxantrone/Novantrone (Lederle Laboratories), nandrolone phenpropionate/Durabolin-50 (Organon), Nofetumomab/Verluma (Boehringer Ingelheim Pharma KG (formerly Dr. Karl Thomae GmbH)), Oprelvekin/Neumega (Genetics Institute), oxaliplatin/Eloxatin (Sanofi Synthelabo), paclitaxel/Taxol (Bristol-Myers Squibb), pamidronate/Aredia (Novartis), pegademase/Adagen (Pegademase Bovine) (Enzon), Pegaspargase/Oncaspar (Enzon, Inc), Pegfilgrastim/Neulasta (Amgen, Inc), pentostatin/Nipent (Parke-Davis Pharmaceutical Co.), pipobroman/Vercyte (Abbott Labs), plicamycin/mithramycin/Mithracin (Pfizer Labs), porfimer sodium/Photofrin (QLT Phototherapeutics Inc.), procarbazine/Matulane (Sigma Tau Pharms), quinacrine/Atabrine (Abbott Labs), Rasburicase/Elitek (Sanofi-Synthelabo, Inc), Rituximab/Rituxan (Genentech, Inc), Sargramostim/Prokine (Immunex Corp), streptozocin/Zanosar (Pharmacia & Upjohn Company), talc/Sclerosol (Bryan), tamoxifen/Nolvadex (AstraZeneca Pharmaceuticals), temozolomide/Temodar (Schering), teniposide/VM-26/Vumon (Bristol-Myers Squibb), testolactone/Teslac (Bristol-Myers Squibb), thioguanine/6-TG/Thioguanine (GlaxoSmithKline), thiotepa/Thioplex (Lederle Laboratories), topotecan/Hycamtin (GlaxoSmithKline), topotecan/Hycamtin (GlaxoSmithKline), toremifene/Fareston (Orion Corp), Tositumomab/Bexxar (Corixa Corporation), Trastuzumab/Herceptin (Genentech, Inc), tretinoin/ATRA/Vesanoid (Roche), Uracil Mustard (Roberts Labs), valrubicin/Valstar (Medeva), vinblastine/Velban (Eli Lilly), vincristine/Oncovin (Eli Lilly), vinorelbine/Navelbine (GlaxoSmithKline), and zoledronate/Zometa (Novartis).

[2622] 1379. The method for vaccination according to item 1366, wherein the one or more medicaments can be selected from the group of the immunotherapeutic agents comprising Ributaxin, Herceptin, Quadramet, Panorex, IDEC-Y2B8, BEC2, C225, Oncolym, SMART MI 95, ATRAGEN, Ovarex, Bexxar, LDP-03, ior t6, MDX-210, MDX-11, MDX-22, OV103, 3622W94, anti-VEGF, Zenapax, MDX-220, MDX-447, MELIMMUNE-2, MELIMMUNE-1, CEACIDE, Pretarget, NovoMAb-G2, TNT, Gliomab-H, GNI-250, EMD-72000, LymphoCide, CMA 676, Monopharm-C, 4B5, ior egf.r3, ior c5, BABS, anti-FLK-2, MDX-260, ANA Ab, SMART 1D10 Ab, SMART ABL 364 Ab and ImmuRAIT-CEA, a cytokine or an interferon.

[2623] 1380. The method for vaccination according to item 1366, wherein the one or more medicaments can be an antiviral drug such as a Nucleoside/Nucleotide Reverse Transcriptase Inhibitor.

[2624] 1381. The method for vaccination according to item 1366, wherein the one or more medicaments can be an antiviral drug such as Non-Nucleoside Reverse Transcriptase Inhibitors.

[2625] 1382. The method for vaccination according to item 1366, wherein the one or more medicaments can be a Protease Inhibitor.

[2626] 1383. The method for vaccination according to item 1366, wherein the one or more medicaments can be a Fusion or Entry Inhibitor.

[2627] 1384. The method for vaccination according to item 1366, wherein the one or more medicaments can be an Integrase Inhibitor.

[2628] 1385. The method for vaccination according to item 1366, wherein the one or more medicaments can be selected from the group consisting of lamivudine, Epivir, abacavir, Ziagen, AZT or ZDV, Zidovudine, Retrovir, d4T, Stavudine, Zerit, ddC, Zalcitabine, Hivid, ddI, didanosine, Videx (tablet), Videx EC (capsule), FTC, emtricitabine, Emtriva, TDF, tenofovir, Viread, Epzicom, Kivexa, Trizivir, Combivir, Truvada, Delavirdine, Rescriptor, Efavirenz, Sustiva, Stocrin, Etravirine, Intelence, Nevirapine, Viramune, amprenavir, Agenerase, fosamprenavir, Lexiva, Telzir, Atazanavir, Reyataz, Darunavir, Prezista, Indinavir, Crixivan, lopinavir, ritonavir, Kaletra, Aluvia, nelfinavir, Viracept, ritonavir, Norvir, saquinavir, Fortovase, Invirase, Tipranavir, Aptivus, Enfuvirtide, Fuzeon, maraviroc, Celsentri, Selzentry, raltegravir, Isentress, Atripla, Atazanavir/r, Darunavir/r, Raltegravir, Maraviroc, and Etravirine.

[2629] 1386. The composition according to items 1-1170, wherein the composition is in solid form.

[2630] 1387. The composition according to items 1-1170, wherein the composition is in insoluble form.

[2631] 1388. The composition according to items 1-1170, wherein the composition is in soluble form.

[2632] 1389. The composition according to items 1-1170, wherein the composition is in suspension.

[2633] 1390. The composition according to items 1-1170, wherein the composition is sterile.

[2634] 1391. The composition according to items 1-1170, wherein the composition is prepared as sterile injectables either as liquid solutions or suspensions, aqueous or non-aqueous.

[2635] 1392. The composition according to items 1-1170, wherein the composition is prepared in solid form suitable for solution, or suspensions, in liquid prior to use.

[2636] 1393. The composition according to items 1-1170, wherein the composition is emulsified.

[2637] 1394. The composition according to items 1-1170, wherein the composition is mixed with excipients which are pharmaceutically acceptable such as water, saline, dextrose, glycerol, ethanol or the like and combinations thereof.

[2638] 1395. The composition according to items 1-1170, wherein the composition comprises minor amounts of auxiliary substances such as wetting or emulsifying agents, pH buffering agents and the like which enhance the effectiveness of the pharmamer.

[2639] 1396. The composition according to items 1-1170, wherein the composition has a pH within the range of 3.5-8, such as in the range 4.5-7.5, such as in the range 5.5-7, such as in the range 6-7.5, most preferably around 7.3.

[2640] 1397. The composition according to items 1-1170, wherein the composition has a pH within the range 3.5-7, such as 4-6, such as 5-6, such as 5.3-5.7, such as 5.5.

[2641] 1398. The composition according to items 1-1170, wherein the composition is for parenteral administration and wherein the composition is dissolved or suspended in sterile aqueous solution, aqueous propylene glycol or sesame or peanut oil.

[2642] 1399. The composition according to items 1-1170, wherein the composition is a liquid composition comprising liquid phases in addition to and to the exclusion of water such as glycerin, vegetable oils such as cottonseed oil, organic esters such as ethyl oleate, and water-oil emulsions.

[2643] 1400. The composition according to items 1-1170, wherein the composition comprises one or more suitable pharmaceutical carriers such as inert solid diluents or fillers, sterile aqueous solution and various organic solvents.

[2644] 1401. The composition according to items 1-1170, wherein the composition comprises one or more solid carriers such as lactose, terra alba, sucrose, cyclodextrin, talc, gelatine, agar, pectin, acacia, magnesium stearate, stearic acid or lower alkyl ethers of cellulose.

[2645] 1402. The composition according to items 1-1170, wherein the composition comprises one or more liquid carriers such as syrup, peanut oil, olive oil, phospholipids, fatty acids, fatty acid amines, polyoxyethylene or water.

[2646] 1403. The composition according to items 1-1170, wherein the composition is administered by nasal aerosol or inhalation and wherein the composition is prepared for example, as solutions in saline, employing benzyl alcohol or other suitable preservatives, absorption promoters to enhance bioavailability, employing fluorocarbons, and/or employing other solubilizing or dispersing agents.

[2647] 1404. The composition according to items 1-1170, wherein the composition is prepared in unit dosage form.

[2648] 1405. The composition according to items 1-1170, wherein the composition is prepared as a lyophilisate.

[2649] 1406. The composition according to items 1-1170, wherein the composition comprises a solvent.

[2650] 1407. The composition according to items 1-1170, wherein the composition is prepared as an injectable solution.

[2651] 1408. The composition according to items 1-1170, wherein the composition is prepared as a dispersion.

[2652] 1409. The composition according to items 1-1170, wherein the composition is prepared as a suspension.

[2653] 1410. The composition according to items 1-1170, wherein the composition is prepared as a emulsion.

[2654] 1411. The composition according to items 1-1170, wherein the composition is prepared as a sterile powders to be reconstituted in sterile injectable solutions or dispersions prior to use.

[2655] 1412. The composition according to items 1-1170, wherein the composition is prepared as suppositories.

[2656] 1413. The composition according to items 1-1170, wherein the composition is prepared as a spray.

[2657] 1414. The composition according to items 1-1170, wherein the composition is prepared as an ointment, creme, or gel.

[2658] 1415. The composition according to items 1-1170, wherein the composition is prepared as an inhalant.

[2659] 1416. The composition according to items 1-1170, wherein the composition is prepared as a dermal patch.

[2660] 1417. The composition according to items 1-1170, wherein the composition is prepared as an implant.

[2661] 1418. The composition according to items 1-1170, wherein the composition is prepared as a pill, tablet, lozenge or capsule.

[2662] 1419. The composition according to items 1-1170, wherein the composition is formulated for aerosol administration, particularly to the respiratory tract and including intranasal administration.

[2663] 1420. The composition according to items 1-1170, wherein the composition is prepared in a pressurized pack with a suitable propellant such as a chlorofluorocarbon (CFC) for example dichlorodifluoromethane, trichlorofluoromethane, or dichlorotetrafluoroethane, carbon dioxide or other suitable gas.

[2664] 1421. The composition according to items 1-1170, wherein the composition is a powder comprising a powder base such as lactose, starch, starch derivatives such as hydroxypropylmethyl cellulose and polyvinylpyrrolidine (PVP).

[2665] 1422. The composition according to items 1-1170, wherein the composition is prepared as a gel.

[2666] 1423. The composition according to items 1-1170, wherein the composition is prepared as a capsules or cartridges of e.g., gelatin or blister packs.

[2667] 1424. The composition according to items 1-1170, wherein the composition is prepared as an aerosol prepared, for example, as solutions in saline, employing benzyl alcohol or other suitable preservatives, absorption promoters to enhance bioavailability, employing fluorocarbons, and/or employing other solubilizing or dispersing agents.

[2668] 1425. The composition according to items 1-1170, wherein the composition is formulated for parenteral administration.

[2669] 1426. The composition according to items 1-1170, wherein the composition is formulated for intravenous administration.

[2670] 1427. The composition according to items 1-1170, wherein the composition is formulated for intramuscular administration.

[2671] 1428. The composition according to items 1-1170, wherein the composition is formulated for intraarticular formulation.

[2672] 1429. The composition according to items 1-1170, wherein the composition is formulated for subcutaneous administration.

[2673] 1430. The composition according to items 1-1170, wherein the composition is formulated for intradermal administration.

[2674] 1431. The composition according to items 1-1170, wherein the composition is formulated for epicutantous/transdermal administration.

[2675] 1432. The composition according to items 1-1170, wherein the composition is formulated for intra-peritoneal administration.

[2676] 1433. The composition according to items 1-1170, wherein the composition is formulated for infusion.

[2677] 1434. The composition according to items 1-1170, wherein the composition is formulated for oral administration.

[2678] 1435. The composition according to items 1-1170, wherein the composition is formulated for nasal administration.

[2679] 1436. The composition according to items 1-1170, wherein the composition is formulated for rectal administration.

[2680] 1437. The composition according to items 1-1170, wherein the composition is formulated for vaginal administration.

[2681] 1438. The composition according to items 1-1170, wherein the composition is formulated for topic administration.

[2682] 1439. The composition according to items 1-1170, wherein the composition comprises one or more pharmamers immobilised onto a solid or semi-solid support such as particles, beads, biodegradable particles, sheets, gels, filters, membranes, fibres, capillaries, needles, microtitre strips, tubes, plates or wells, combs, pipette tips, micro arrays, and chips.

[2683] 1440. The composition according to items 1-1170, wherein the composition comprises one or more pharmamers immobilised onto particles and beads, which are polymeric, magnetic or superparamagnetic.

[2684] 1441. The composition according to items 1-1170, wherein the composition comprises one or more pharmamers that target specific MHC recognising cells.

[2685] 1442. The composition according to items 1-1170, wherein the composition comprises one or more pharmamers capable of induction of a response in specific target MHC recognising cells by addressing receptors on such cells.

[2686] 1443. The composition according to item 882, wherein the one or more biological active molecules and the one or more multimerization domain by a mechanism comprising biotinylation.

[2687] 1444. The composition according to item 1443, where the mechanism comprises Streptavidin and/or Avidin and Biotin.

[2688] 1445. The composition according to item 1443, where the mechanism comprises enzymatic biotinylation.

[2689] 1446. The composition according to item 1443, where the mechanism comprises non-enzymatic biotinylation.

[2690] 1447. The composition according to item 882, wherein the one or more biological active molecules are directly or indirectly bound to the multimerization domain.

[2691] 1448. The composition according to item 882, wherein the one or more biological active molecules are not directly or indirectly bound to the multimerization domain.

### EXAMPLES

### Example 1

### Example of a Vaccine Consisting of Pharmamers for Vaccination Against HIV/SIV in Monkeys

[2692] The vaccine is composed of a Dextran (270 kDa) multimerisation domain that has been derivatized by attaching Strepavidin (on average 8.6 Strepavidin molecules/Dextran molecule). Attached to the streptavidin molecules are Simian MHC class 1 molecules, either Mamu-A*01(CTPYDINQM) (SEQ ID NO 9569), Mamu-A*08(KPCVKLTP) (SEQ ID NO 9570), or Mamu-B*17(IRFPKTFGW) (SEQ ID NO 9571). Attachment is done by non-covalent interaction via a COOH-terminal Biotin molecule on the recombinant Mamu heavy chain and the streptavidin molecules on the Dextran multimerisation domain. Likewise are biotinylated synthetic Mamu class 2 peptides representing Mamu-DQB1*0601(EFVRFDSAVGEYRAV) (SEQ ID NO 9572); Mamu-DQB1*1808(EFVGFDSYLGVYRPV) (SEQ ID NO 9573); Mamu-DRB*W201 (TREDILERERAQVDTFY) (SEQ ID NO 9574) and recombinant HSP70pep3Bio fragments (a biotinylated HSP70 fragment spanning amino acid residues 359-609) attached to strepavidin sites.

[2693] The Mamu class 1 bound peptides represents the proteins, HIV-Gag (CTPYDINQM) (SEQ ID NO 9569), HIV-Env (KPCVKLTP) (SEQ ID N09570) and Siv Nef (IRFPKTFGW) (SEQ ID NO 9571).

[2694] A single full dose of the final vaccine corresponds to, 100 □g of each MHC class 1 molecule; 4.6 μg of each MHC class 2 peptide; 3×25.9 μg HSP70pep3Bio and 3×162.5 □g dextran (corresponding to a total of approx 260 μg pharmamer/kg body weight for a monkey of 3.5 kg) and consist of a 1:1:1 mixture of the following three pharmamers:

### Pharmamer 1:

[2695] Mamu-A*01(CTPYDINQM) (SEQ ID NO 9569)+Mamu-DQB1*0601 (EFVRFDSAVGEYRAV) (SEQ ID NO 9572) class 2 peptide+HSP70pep3Bio+Dextran multimerisation domain, in the molar ratio 10/10/4/1

### Pharmamer 2:

[2696] Mamu-A*08 (KPCVKLTP) (SEQ ID NO 9570)+Mamu-DQB1*1808 (EFVGFDSYLGVYRPV) (SEQ ID NO 9573) class 2 peptide+HSP70pep3Bio+Dextran multimerisation domain, in the molar ratio 10/10/4/1

### Pharmamer 3:

[2697] Mamu-B*17(IRFPKTFGW) (SEQ ID NO 9571)+Mamu-DRB*W201 (TREDILERERAQVDTFY) (SEQ ID NO 9574) class 2 peptide+HSP70pep3Bio+Dextran multimerisation domain, in the molar ratio 10/10/4/1

### Administration:

[2698] The pharmamer mix is absorbed into the adjuvant Alhydrogel (Aluminiumhydroxide gel) as specified by the manufacturer and administered as intramuscular injections at time points 0, 4, 8, and 16 weeks such that a full dose is given at 0 weeks and half-full dose at 4, 8, and 16 weeks.

### Example 2

### Example of a Vaccine Consisting of Pharmamers for Vaccination Against HIV/SIV in Monkeys

[2699] The vaccine is composed of a Dextran (270 kDa) multimerisation domain that has been derivatized by attaching Strepavidin (on average 8.6 Strepavidin molecules/Dextran molecule). Attached to the Dextran-streptavidin multimerisation domain are Simian MHC class 1 molecules, either Mamu-A*01(CTPYDINQM) (SEQ ID NO 9569), Mamu-A*08(KPCVKLTP) (SEQ ID NO 9570), or Mamu-B*17(IRFPKTFGW) (SEQ ID NO 9571). Attachment is done via a COOH-terminal Biotin molecule on the recombinant Mamu heavy chain to the streptavidin molecules on the multimerisation domain. Likewise are biotinylated synthetic Mamu class 2 peptides representing Mamu-DQB1*0601 (EFVRFDSAVGEYRAV) (SEQ ID NO 9572); Mamu-DQB1*1808 (EFVGFDSYLGVYRPV) (SEQ ID NO 9573); Mamu-DRB*W201 (TREDILERERAQVDTFY) (SEQ ID NO 9574) and recombinant HSP70pep3Bio fragments (a biotinylated HSP70 fragment spanning amino acid residues 359-609) attached to strepavidin sites. Further to these molecules are recombinant HIV-1gp140 trimer and SIVp27 attached by Biotin-Strepavidin binding.

[2700] The Mamu class 1 bound peptides represents the proteins, HIV-Gag (CTPYDINQM) (SEQ ID NO 9569); HIV-Env (KPCVKLTP) (SEQ ID NO 9570); and Siv Nef (IRFPKTFGW) (SEQ ID NO 9571).

[2701] A single full dose of the final vaccine corresponds to, 100 □g of each MHC class 1 molecule; 4.6 μg of each MHC class 2 peptide; 4×25.9 ug HSP70pep3Bio; 37.1 μg Sivp27; 152.8 μg HIV-1gp140trimer and 4×162.7 μg dextran (corresponding to a total of approx 360 μg pharmamer/kg body weight for a monkey of 3.5 kg) and consist of a 1:1:1:1 mixture of the following four pharmamers:

### Pharmamer 1:

[2702] Mamu-A*01(CTPYDINQM) (SEQ ID NO 9569)+Mamu-DQB1*0601 (EFVRFDSAVGEYRAV) (SEQ ID NO 9572) class 2 peptide+HSP70pep3Bio+Dextran multimerisation domain, in the molar ratio 10/10/4/1

### Pharmamer 2:

[2703] Mamu-A*08 (KPCVKLTP) (SEQ ID NO 9570)+Mamu-DQB1*1808 (EFVGFDSYLGVYRPV) (SEQ ID NO 9573) class 2 peptide+HSP70pep3Bio+Dextran multimerisation domain, in the molar ratio 10/10/4/1

### Pharmamer 3:

[2704] Mamu-B*17(IRFPKTFGW) (SEQ ID NO 9571)+Mamu-DRB*W201 (TREDILERERAQVDTFY) (SEQ ID NO 9574) class 2 peptide+HSP70pep3Bio+Dextran multimerisation domain, in the molar ratio 10/10/4/1

### Pharmamer 4:

[2705] Sivp27+HIV-1gp140trimer+HSP70pep3Bio+Dextran multimerisation domain, in the molar ratio 3/10/4

### Administration:

[2706] The pharmamer mix is absorbed into the adjuvant Alhydrogel (Aluminiumhydroxide gel) as specified by the manufacturer and administered as intramuscular injections at time points 0, 4, 8, and 16 weeks such that a full dose is given at 0 weeks and half-full dose at 4, 8, and 16 weeks.

### Example 3

### Example of a Vaccine Consisting of Pharmamers for Vaccination Against HIV/SIV in Monkeys

[2707] The vaccine is composed of a Dextran (270 kDa) multimerisation domain that has been derivatized by attaching Streptavidin (on average 8.6 Streptavidin molecules/Dextran molecule). Attached to the multimerisation domain are Human MHC class 1 molecules, either HLA-A*0101(IVDCLTEMY) (SEQ ID NO 9575), HLA-A*0201(GLIQLVEGV) (SEQ ID NO 9576), HLA-A*0301(RIAAWMATY) (SEQ ID NO 9577), HLA-A*1101(IVTDFSVIK) (SEQ ID NO 9578). Attachment is done via a COOH-terminal Biotin molecule on the recombinant HLA heavy chain to the streptavidin molecules on the multimerisation domain. Likewise are biotinylated recombinant HLA class 2 protein HLA-DR*0401 and recombinant HSP70pep3Bio fragments (a biotinylated HSP70 fragment spanning amino acid residues 359-609) attached to streptavidin sites.

[2708] The HLA class 1 bound peptides represents the proteins, USP9Y, ubiquitin specific protease 9 (IVDCLTEMY) (SEQ ID NO 9575); TRAG-3_{—}4 (GLIQLVEGV) (SEQ ID NO 9576); BCL2L1 (RIAAWMATY) (SEQ ID NO 9577); EBV EBNA3B (IVTDFSVIK) (SEQ ID NO 9578). The HLA class 2 complex is produced without a peptide in the binding groove but it cannot be excluded that the groove may contain unknown peptides derived from either serum or the S2 production cells.

### Administration:

[2709] A single full dose of the final vaccine corresponds to, 100 □g of each HLA class 1 molecule; 113.5 μg of HLA class 2; 3×25.8 μg HSP70pep3Bio and 3×162.2 μg dextran (corresponding to a total of approx 300 μg pharmamer/kg body weight for a monkey of 3.5 kg) and consist of a 1:1:1 mixture of the following three pharmamers:

### Pharmamer 5:

[2710] HLA-A*0101(IVDCLTEMY) (SEQ ID NO 9575)+HLA-DR*0401 class 2+HSP70pep3Bio+Dextran multimerisation domain, in the molar ratio 10/10/4/1

### Pharmamer 6:

[2711] HLA-A*0201(GLIQLVEGV) (SEQ ID NO 9576)+HLA-A*0301(RIAAWMATY) (SEQ ID NO 9577)+HSP70pep3Bio+Dextran multimerisation domain, in the molar ratio 10/10/4/1

### Pharmamer 7:

[2712] HLA-A*1101(IVTDFSVIK) (SEQ ID NO 9578)+HSP70pep3Bio+Dextran multimerisation domain, in the molar ratio 10/4/1

### Administration:

[2713] The pharmamer mix is emulsified with the adjuvant Titermax Gold as specified by the manufacturer and administered as intramuscular injections at time points 0, 4, 8, and 16 weeks such that a full dose is given at 0 weeks and half-full dose at 4, 8, and 16 weeks.

### Example 4

### Example of a Vaccine Consisting of Pharmamers for Vaccination Against HIV/SIV in Monkeys

[2714] The vaccine is composed of a Dextran (270 kDa) multimerisation domain that has been derivatized by attaching Streptavidin (on average 8.6 Streptavidin molecules/Dextran molecule). Attached to the multimerisation domain are Human MHC class 1 molecules, either HLA-A*0101(IVDCLTEMY) (SEQ ID NO 9575), HLA-A*0201(GLIQLVEGV) (SEQ ID NO 9576), HLA-A*0301(RIAAWMATY) (SEQ ID NO 9577), or HLA-A*1101(IVTDFSVIK) (SEQ ID NO 9578). Attachment is done via a COOH-terminal Biotin molecule on the recombinant HLA heavy chain to the streptavidin molecules on the multimerisation domain. Likewise are biotinylated recombinant HLA class 2 protein HLA-DR*0401 and recombinant HSP70pep3Bio fragments (a biotinylated HSP70 fragment spanning amino acid residues 359-609) attached to streptavidin sites. Further to these molecules are recombinant HIV-1gp140 trimer and SIVp27 attached by Biotin-Streptavidin binding.

[2715] The HLA class 1 bound peptides represents the proteins, USP9Y, ubiquitin specific protease 9 (IVDCLTEMY) (SEQ ID NO 9575); TRAG-3_{—}4 (GLIQLVEGV) (SEQ ID NO 9576); BCL2L1 (RIAAWMATY) (SEQ ID NO 9577); EBV EBNA3B (IVTDFSVIK) (SEQ ID NO 9578). The HLA class 2 complex is produced without a peptide in the binding groove but it cannot be excluded that the groove may contain unknown peptides derived from either serum or the S2 production cells.

[2716] A single full dose of the final vaccine corresponds to, 100 μg of each HLA class 1 molecule; 113.5 μg of HLA class 2; 4X25.9 ug HSP70pep3Bio; 37.1 μg Sivp27; 152.8 μg HIV-1gp140trimer and 4×162.7 μg dextran (corresponding to a total of approx 415 μg pharmamer/kg body weight for a monkey of 3.5 kg) and consist of a 1:1:1:1 mixture of the following four pharmamers:

### Pharmamer 5:

[2717] HLA-A*0101(IVDCLTEMY) (SEQ ID NO 9575)+HLA-DR*0401 class 2+HSP70pep3Bio+Dextran multimerisation domain, in the molar ratio 10/10/4/1

### Pharmamer 6:

[2718] HLA-A*0201(GLIQLVEGV) (SEQ ID NO 9576)+HLA-A*0301(RIAAWMATY) (SEQ ID NO 9577)+HSP70pep3Bio+Dextran multimerisation domain, in the molar ratio 10/10/4/1

### Pharmamer 7:

[2719] HLA-A*1101(IVTDFSVIK) (SEQ ID NO 9578)+HSP70pep3Bio+Dextran multimerisation domain, in the molar ratio 10/4/1

### Pharmamer 4:

[2720] Sivp27+HIV-1gp140trimer+HSP70pep3Bio+Dextran multimerisation domain, in the molar ratio 3/10/4

### Administration:

[2721] The pharmamer mix is emulsified with the adjuvant Titermax Gold as specified by the manufacturer and administered as intramuscular injections at time points 0, 4, 8, and 16 weeks such that a full dose is given at 0 weeks and half-full dose at 4, 8, and 16 weeks.

### Example 5

### Example of a Vaccine Consisting of Pharmamers for Vaccination Against HIV/SIV in Monkeys

[2722] The vaccine is composed of a Dextran (270 kDa) multimerisation domain that has been derivatized by attaching Streptavidin (on average 8.6 Streptavidin molecules/Dextran molecule). Attached to the multimerisation domain are Simian MHC class 1 molecules, either Mamu-A*01(CTPYDINQM) (SEQ ID NO 9569), Mamu-A*08(KPCVKLTP) (SEQ ID NO 9570), or Mamu-B*17(IRFPKTFGW) (SEQ ID NO 9571). Attachment is done via a COOH-terminal Biotin molecule on the recombinant Mamu heavy chain to the streptavidin molecules on the multimerisation domain. Likewise are biotinylated recombinant HSP70pep3Bio-CCR5-tripeptide fragment, a biotinylated fusion protein consisting of the HSP70 fragment spanning amino acid residues 359-609 plus the antigenic CCR5 loops, N-terminal loop, Loop1 and Loop2, attached to streptavidin sites.

[2723] The Mamu class 1 bound peptides represents the proteins, HIV-Gag (CTPYDINQM) (SEQ ID NO 9569), HIV-Env (KPCVKLTP) (SEQ ID NO 9570) and Siv Nef (IRFPKTFGW) (SEQ ID NO 9571). The CCR5 peptides representing the three antigenic loops are, N-terminal (MNYQVSSPIYNINYYTSEPC) (SEQ ID NO 9579); Loop1 (HYAAAQWNFGNTMCQ) (SEQ ID NO 9580); Loop2 (YSSHFPYSQYQFWKNFQTLK) (SEQ ID NO 9581).

[2724] A single full dose of the final vaccine corresponds to, 100 □g of each MHC class 1 molecule; 3×126 □g HSP70pep3Bio-CCR5-tripeptide and 3×125 □g dextran (corresponding to a total of approx 300 □g pharmamer/kg body weight for a monkey of 3.5 kg) and consist of a 1:1:1 mixture of the following three pharmamers

### Pharmamer 8:

[2725] Mamu-A*01(CTPYDINQM) (SEQ ID NO 9569)+HSP70pep3Bio-CCR5-tripeptide+Dextran multimerisation domain, in the molar ratio 13/10/1

### Pharmamer 9:

[2726] Mamu-A*08 (KPCVKLTP) (SEQ ID NO 9570)+HSP70pep3Bio-CCR5-tripeptide+Dextran multimerisation domain, in the molar ratio 13/10/1

### Pharmamer 10:

[2727] Mamu-B*17(IRFPKTFGW) (SEQ ID NO 9571)+HSP70pep3Bio-CCR5-tripeptide+Dextran multimerisation domain, in the molar ratio 13/10/1

### Administration:

[2728] The pharmamer mix is administered as intramuscular injections at time points 0, 2, 4, 6, 8, 10, 12 and 14 weeks such that a full dose is given at each time point.

### Example 6

[2729] This is an example of generation of a pharmamers that can be used in a vaccine composition for treatment of SIV/HIV.

[2730] 4 different vaccine compositions were generated comprising between 1-4 pharmamers whereto 3-5 different biological active molecules were attached. The multimerization domain in all pharmamers was Streptavidin (SA) coupled Dextran (270 kDa) and the biologically active molecules were attached to the SA-Dextran backbone by a non-covalent interaction between SA and biotin on the biologically active molecules. In the following generation of the individual components in the pharmamers are described:

### Generation of Multimerization Domain:

[2731] Dextran270 were coupled with SA using the following procedure. Divinyl sulfone acid activated Dextran270 were mixed with SA in a molar ratio of 1:13 (Dextran270:SA) in buffer (0.025 M NaHCO3, 0.1 M NaCl) for 2 hours at 40° C. The final concentration of Dextran270 was 6 uM. Then the reaction was stopped by adding 10 vol % 0.165 M Cystein, incubation for 30 minutes at 40° C. Excess SA was removed by gelfiltration on a Superdex 200-column and the buffer exchanged to 0.1M NaCl; 10 mM CHES; pH 9.0.

[2732] The final product had a concentration of 0.65 mg/ml and 8.6 SA molecules per Dextran molecule in average.

### Generation of Biotinylated MHC I-Peptide Complexes:

[2733] Four different biotinylated MHC I-peptide complexes were generated:

[2734] HLA-A*0101(IVDCLTEMY) SEQ ID NO 9588), HLA-A*1101 (IVTDFSVIK) SEQ ID NO 9589), HLA-A*0201(GLIQLVEGV) SEQ ID NO 9590, HLA-A*0301(RIAAWMATY) SEQ ID NO 9591.

[2735] The protein coding sequences minus the signal peptide and transmembrane regions of all of the 4 human MHC class 1 heavy chain molecules were obtained from GenBank and the sequence backtranslated according to E. coli codon usage using www.entelechon.com. The gene was synthesized by PCR using 10 overlapping DNA primers (DNA Technology, Denmark) and KOD polymerase (EMD Chemicals, Novagen). Sequence was verified by repeated DNA sequencing (MWG Biotech, Ebersberg, Germany) and base errors introduced were corrected using Quick Change multi site-directed mutagenesis kit (Stratagene, La Jolla, Calif.) before cloning in pGarboczi (Garboczi et al 1992). Human beta2 Microblulin (β2m) (GenBank acc #CAG33347.1) was acquired and cloned. Recombinant MHC 1 heavy chain and β2m protein was produces by fermentation, isolated and purified by column chromatography.

[2736] MHC-peptide complexes was generated by in vitro refolding of heavy chain, β2m and peptide in a buffer containing reduced and oxidized glutathione. By incubation in this buffer a non-covalent complex between Heavy Chain, β2m and peptide was formed. Heavy chain and β2m was expressed as inclusion bodies in E. coli prior to in vitro refolding following standard procedures as described in Garboczi et al., (1996), Nature 384, 134-141. Following refolding the MHC complexes was biotinylated using BirA enzyme able to biotinylate a specific amino acid residue in a recognition sequence fused to the C-terminal of the Heavy Chain by genetic fusion. Monomer MHC complexes was then purified by size exclusion chromatography.
[2737] 1. 200 ml of refolding buffer (100 mM Tris, 400 mM L-arginin-HCL, 2 mM NaEDTA, 0.5 mM oxidized Gluthathione, 5 mM reduced Glutathione, pH 8.0) was supplied with protease inhibitors PMSF (phenylmethylsulphonyl fluoride), Pepstatin A and Leupeptin (to a final concentration of 1 mM, 1 mg/l and 1 mg/l, respectively). The refolding buffer was placed at 10° C. on a stirrer.
[2738] 2. 12 mg of peptide was dissolved in DMSO or another suitable solvent (300-500 μl), and added drop-wise to the refolding buffer at vigorous stirring.
[2739] 3. 4.4 mg of human Light Chain β2m was added drop-wise to the refolding buffer at vigorous stirring.
[2740] 4. 6.2 mg of Heavy Chain (supplied with DTT to a concentration of 0.1 mM) was added drop-wise to the refolding buffer at vigorous stirring.
[2741] 5. The folding reaction was placed at 10° C. at slow stirring for 4-8 hours.
[2742] 6. After 4-8 hours, step 3 and 4 was repeated and the folding reaction is placed at 10° C. at slow stirring O/N.
[2743] 7. Step 3 and 4 was repeated, and the folding reaction is placed at 10° C. at slow stirring for 6-8 hours.

[2744] Optionally, steps 5-7 may be done in less time, e.g. a total of 0.5-5 hours.
[2745] 8. After 6-8 hours the folding reaction was filtrated through a 0.2 μm filter to remove aggregates.
[2746] 9. The folding reaction was concentrated O/N at 10° C. shaking gently in a suitable concentrator with a 5000 mw cut-off filter. The folding reaction was concentrated to approximately 5-10 ml. (Optionally the filtrate can be stored at 4° C. and reused for another folding with the same peptide and heavy chain.)
[2747] 10. The concentrated folding reaction was buffer-exchanged at least 8 times, into a MHC-buffer (20 mM Tris-HCl, 50 mM NaCl, pH 8.0) and concentrated (at 10° C. in a suitable concentrator with a 5000 mw cut-off filter) down to approximately 1 ml.
[2748] 11. The heavy chain part of the MHC-complex was biotinylated by mixing the following components: approximately 1000 μl folded MHC-complex, 100 μl each of Biomix-A, Biomix-B and d-Biotin (all 3 from Biotin Protein Ligase Kit from Avidity, 10 μl birA enzyme (3 mg/ml, from Biotin Protein Ligase Kit from Avidity, 0.5 μl Pepstatin A (2 mg/ml) and 0.5 μl Leupeptin (2 mg/ml). The above was gently mixed and incubated O/N at room temperature.
[2749] 12. The biotinylated and folded MHC-complex solution was centrifuged for 5 min. at 1700×g, room temperature.
[2750] 13. Correctly folded MHC-complex was separated and purified from excess biotin, excess β2m, excess heavy chain and aggregates thereof, by size exclusion chromatography on a column that separates proteins in the 10-100 kDa range. Correctly folded monomer MHC-complex was eluted with a MHC-buffer (20 mM Tris-HCl, 50 mM NaCl, pH 8.0). The elution profile consisted of 4 peaks, corresponding to aggregated Heavy Chain, correctly folded monomer MHC-complex, β2m and excess biotin and peptide.
[2751] 14. Fractions containing the folded MHC-complex were pooled and concentrated to approximately 1 ml in a suitable concentrator with a 5000 mw cut-off filter. The protein-concentration was estimated from its absorption at 280 nm.
[2752] 15. The grade of biotinylation was analyzed by a SDS PAGE SHIFT-assay with Streptavidin and correct folding was confirmed by ELISA, using the antibody W6/32 that recognizes correctly folded MHC-peptide complex.

### Generation of Biotinylated DR4 Molecules:

[2753] DR0401-leucine zipper-biotinylation site-expression vectors were made using the PCR-mediated splicing overlap technique together with the plasmid pUChsneo, which carries the neomycin resistance marker, were co-transfected into Schneider cells S-2 by standard calcium phosphate transfection techniques. The DR*0401 (DR4) molecules were purified by affinity chromatography using L243 antibody as described previously (Stern and Wiley 1992). The DR4 molecules were biotinylated using BirA enzyme and a standard protocol following a standard biotinylation protocol provided by the manufacturer

Construction, Purification and Production of Trimeric HIVgp140 (YU2gp140) (SEQ ID NO 9583).

[2754] PCR Cloning was carried out by inserting the Avi tag in the YU2gp140 Foldon trimer; two sets of PCR overlapping primers were designed. The first set of primers was used with YU2 gp140 foldon construct and to amplify the portions of YU2 gp140 region from BamH1 site through the foldon trimerization motif, His tag and some seq. of Avi tag followed by the stop codon. The other set amplified the His Tag followed by Avi tag seq. and the rev primer amplified the Hind III site, a stop codon and the remaining of the Avi tag. After one round of amplification both the reaction were mixed and the PCR was performed using the Fw primer from first set and the rev primer from second set. PCR amplified product was run on 1% agarose gel at 100V constant and eluted from the gel using standard procedure. The amplified fragment was digested with BamH1 followed by Hind III. The vector DNA was similarly sequentially digested with the following enzymes and a ligation reaction was performed using the Rapid ligation kit from Roche. The Top10 competent cells (Invitrogen) were transformed with the 5 ul of ligation mix and then plated on Carbenicillin containing plates. 10 colonies were picked up and inoculated in LB medium containing the Carbenecillin and Mini prep was performed using Qiagen kit. The DNA was sent for seq. to ACGT, Inc. using YU2 gp140 Fw primer and seq analysis was performed in the Vector NTI program. The 293 freestyle cells were obtained from Invitrogen and were maintained in serum-free media. The transient transfection was performed when cells reached a density of 2-3×10̂6/ml and dilute it to 1.2×10̂6/ml with fresh medium in 1 L batches using 293 fectin reagent from Invitrogen. The transfection grade DNA was obtained from Aldeveron and the transfection was set using standard protocol. After 4 days in culture the supernatant was collected by centrifuging cells in 250 ml conical tubes at 1500 rpm for 30′. The protease inhibitors tablets from Roche were added (1 tablet/50 ml of sup) and the supernatant was centrifuged using 0.2 um filters. The supernatant was checked by immuno-precipitation with monoclonal antibodies such as b12 for protein expression and then loaded onto the Lentil Lectin (GE Health Care) column overnight (FIG. 1B). The column was washed with at least 10V PBS with 0.5M NaCl and the glycoproteins were eluted with 1 M-α D Methyl Mannopyranoside by rocking the column with 10 volumes of elution buffer. The proteins from the first column were loaded onto Ni column and further eluted with 300 mM-imidazole phosphate buffer. The protein was concentrated by using 30 kDa Millipore concentrators and buffer exchanged with PBS. The total amount of the protein was determined using Spectrophotometer 3000 by OD 280 nM. Trimeric HIVgp140 was biotinylated using BirA enzyme following a standard biotinylation protocol provided by the manufacturer.

### Generation of SIVp27 (SEQ ID NO 9584)

[2755] Recombinant SIV 27gag (SIVp27) was expressed as pGEX-3× glutathione S-transferase fusion protein from Escherichia coli as previously described (Mills et al 1992). Recombinant proteins were reconstituted at 2 mg/ml in PBS. A 10 fold molar excess of Sulpho-NHS-LC-LC Biotin (Pierce UK), at ˜10 mM in PBS, was added to the protein solutions and incubated at room temperature for 30 minutes. Excess biotin was removed by dialysis against sterile PBS overnight at 4° C. The biotinylated proteins were then incubated with 2 rounds of polymyxin B beads to remove LPS (GE Healthcare, UK). Verification of biotinylation was performed as follows. The proteins were analysed by SDS-PAGE followed by Coomaasie Blue staining and western blotting onto nitrocellulose. The nitrocellulose blots were probed directly with avidin conjugated to horse radish peroxidase (ExrAvidin, Sigma-Aldrich UK) and developed with 3 Amino 9 ethylcarbazole tablets and hydrogen peroxide in 50 mM Acetate buffer pH 5.0 (Sigma-Aldrich, UK). The proteins were >90% biotinylated.

### Generation of C-Terminal Fragment of HSP70

[2756] The C-terminal fragment of M. tuberculosis HSP70 (359-609) (SEQ ID NO 9582) was subcloned to enable in vitro biotinylation. A primer of 76 bases for PCR was designed that allows fusion of the recognition site for in vivo biotinylation in E. coli to the C-terminal end of HSP₃₅₉₋₆₀₉. Together with a forward cloning primer the HSP₃₅₉₋₆₀₉ fusion gene was amplified and after restriction with NdeI and XhoI inserted into the expression vector pET26. The resulting plasmid pLEXWO167-4 was transformed into E. coli BL21 (DE3). This strain was used for production of biomass. The insert of plasmid pLEXWO167-4 was confirmed by sequencing.

[2757] For rapid purification metal chelate chromatography HSP₃₅₉₋₆₀₉ was fused to a 6-fold histidine tag. The HSP₃₅₉₋₆₀₉ gene was again excised from plasmid pLEXWO167-4 using restriction endonucleases NdeI and XhoI and inserted into pET28 which provides the sequence for the N-terminal histidine tag. The resulting plasmid pLEXWO175-4 was transformed into E. coli BL21 (DE3). This strain was used for production of biomass of biotinylated HSP₃₅₉₋₆₀₉ with N-terminal histidine tag. 2. Biomass derived from BL21 (DE3) [pLEXWO175-4] was disrupted using sonification and homogenization. The supernatant after centrifugation underwent metal chelate affinity chromatography. To achieve a higher purity the protein underwent two further purification steps, by anion exchange and size exclusion chromatography. The highly purified N-his HSP₃₅₉₋₆₀₉-bio (40 mg) was subjected to final quality control and a Western blot.

### Linking the Biologically Active Molecules to Multimerization Domain

[2758] The following pharmamer constructs were made:
[2759] 1) Dextran270+HLA-A*0101(IVDCLTEMY) (SEQ ID NO 9588)+DR4+HSP70 (molar ratio 1:10:10:4)
[2760] 2) Dextran270+HLA-A*0201(GLIQLVEGV) (SEQ ID NO 9590)+HLA-A*0301(RIAAWMATY) (SEQ ID NO 9591)+HSP70 (molar ratio 1:10:10:4)
[2761] 3) Dextran270+HLA-A*1101 (IVTDFSVIK) SEQ ID NO 9589)+HSP70 (molar ratio 1:10:4)
[2762] 4) Dextran270+HIVgp140+Sivp27+HSP70 (molar ratio 1:3:10:4)

[2763] The 4 constructs were made by mixing Dextran270 with the above said biotinylated biological molecules (HLA I-peptide complexes, DR4 molecules, trimeric HIVgp140, SIVp27 and/or HSP70 (359-609)) in molar ratios as described. The final concentration of Dextran was 0.014 M.

[2764] These pharmamers may be used in a composition for vaccination of individuals with HIV or vaccination of healthy individuals for preventing infection with HIV.

### Example 7

[2765] This is an example of how pharmamer vaccine compositions comprising one or more of the pharmamers described in example 6 are used for prophylactic vaccination/immunization of rhesus macaques later challenged with simian HIV.

### Immunization of Macaques

[2766] Thirty-eight female rhesus macaques (Macaca mulatta) of Chinese origin, 3-5 years old at the start of the study, were housed in the Astrid Fagraeus laboratory at the Swedish Institute for Infectious Disease Control. Housing and care procedures were in compliance with the provisions and general guidelines of the Swedish Animal Welfare Agency. All procedures were approved by the Local Ethical Committee on Animal Experiments. Animals were housed in pairs in 4 m³ cages, enriched to allow expression of physiological and behavioural needs. They were habituated to the housing conditions for more than 6 weeks before the start of the experiment, and subjected to positive reinforcement training to reduce the stress associated with experimental procedures. All immunizations and blood sampling were performed under sedation with ketamine 10 mg/kg i.m. (Ketaminol 100 mg/ml, Intervet, Sweden). Macaques were weighed and examined for swelling of lymphnodes and spleen at each immunization or sampling occasion. Before entering the study, all animals were confirmed to be negative for simian immunodeficiency virus (SIV), simian T-cell lymphotrophic virus and simian retrovirus type D.

[2767] 32 of the macaques were divided into 4 groups of eight animals and immunized SC at weeks 0-4-8 and 16 (FIG. 3A) with vaccine compositions comprising one or more of the pharmamers described in example 6. The different groups were immunized with different pharmamer vaccine compositions as described in FIG. 3B. The constituents and concentrations of each of the 4 pharmamers used in a single dose are shown in FIG. 3C. Animals in groups 1-3 received a full vaccine dose at the first immunization and half doses at the following immunizations. The vaccines for groups 1-3 were given subcutaneously (s.c.) formulated as an emulsion with the TiterMax® Gold adjuvant (0.5 mL/full dose; Sigma-Aldrich, St Louis, Mo., USA). An additional six animals (group 5) received the same vaccine as group 2, but intramuscularly (i.m.) without TiterMax® Gold (FIG. 3B), and full vaccine doses at all immunizations.

### SHIV Challenge

[2768] A SHIV-SF162P4 stock was expanded in the human T cell line C8166-CCR5, expressing HLA-A*01 and -DRB1*04. This T cell line expanded stock was designated SHIV-SF162P4/C. A limited in vivo titration was performed in nine rhesus macaques of Chinese origin. 3/3, 2/3 and 0/3 animals became infected after intravenous (i.v.) inoculation with 1 ml of a 1/1,000, a 1/100,000 and a 1/1,000,000 dilution, respectively. The approximate animal infectious dose₅₀ (AID₅₀) was determined by Reed-Muench to be 1.8×10⁵/mL. At week 20 group 1, 2, 3 and 5 animals plus eight naïve animals (group 4) were challenged i.v. with 1 mL of a 1/10,000 dilution (corresponding to 18 MID₅₀, 5.8×10⁴ RNA equivalents/ml, and 22.4 and 0.3 TCID50 as measured on C8166-CCR5 cells and rhesus PBMC, respectively) of SHIV-SF162P4/C.

### Measurement of Viral Load Post Viral Challenge

[2769] Viral load was measured in the animals up to 10 weeks apost SHIV challenge with weekly intervals. The viral load was measured by measuring reverse transcriptase activity in plasma using the ExaVir® Load version 2 kit (Cavidi Tech AB, Uppsala, Sweden) as described by Kiepla et al. Nat. Med. (2007) 13:46-532 and translated to RNA equivalents/ml.

[2770] The peak viral load (2-3 weeks post-challenge) was significantly lower only in group 2 macaques (p<0.05), which were immunized with all vaccine components, compared with the unimmunized animals (FIG. 4A). Group 1 and 5 macaques showed peak viral load at week 3 after infection (in 6/8 and 4/6, respectively), similar to those in the control group 4 (6/8). Group 3 animals however, reached a peak viral load 2 weeks after infection (7/8 animals), followed by a faster fall in the viral load. The cumulative viral load over the 10 week period was then determined and this showed similarly that only group 2 macaques had a significantly lower viral load compared with the unimmunized group 4 animals (FIG. 4B). Two of the 8 macaques in this group remained uninfected and if these are removed the peak (p=0.017) and cumulative (p=0.049) viral load still show a significant decrease in the 6 animals. These results suggest that all vaccine components are required to prevent or inhibit viral infection, as demonstrated in group 2 macaques. The other 3 immunized groups of animals either lacked HIVgp140 and SIVgag p27 (group 1) or HLA-I and II antigens (group 3) or the Titermax adjuvant (group 5).

Measurement of HLA-I and HLA-II Antibodies in Serum from Immunized Animals

[2771] The Luminex HLA antibody method was used to assay specific antibodies to the 5 immunizing HLA-class I and 1 HLA-class II antigens. The sera were initially screened for the presence, or absence, of antibodies specific to HLA Class I or Class II molecules using the Luminex bead based technology (kits from OneLambda Inc.). Briefly, these kits consist of 12 separate bead groups coated with a number of HLA Class I molecules and 5 separate bead groups coated with a number of HLA Class II molecules. They contain all the common, and many of the rare, HLA specificities. The HLA molecules for these beads are isolated from the surface of donor cells and attached by covalent bonds to the luminex beads. Two internal control bead groups, one negative (NC) and one positive (PC) provide background binding information and ensure the test is performing correctly. The beads are incubated with the test sera for 30 minutes, washed, to remove any unbound antibodies and proteins, and then incubated for a further 30 minutes with an appropriate PE conjugated anti-human (IgG) antibody. The beads are then passed through the Luminex analyser, where the level of luminescence from any bound PE is detected and recorded as the Median Fluorescence Index or MFI. The results are analysed by the kit-specific HLA Visual software (OneLambda). The calculation used for screening is:

Test bead Ratio=MFI of Test bead with test sample−MFI of Test bead with Neo control/Internal test sample NC bead−Internal Neg control NC bead

[2772] The calculated ratio then serves as the result for each bead, the current cut-off values are ratio >1.3 for class I and >2.5 for class II. The screening results are recorded as either ‘positive’ or ‘negative’, with a score representing the number of beads groups showing positivity.

[2773] The sera were initially screened neat, and any positive samples were then screened at 1:100 dilutions (in human AB serum) and again, any positive samples were further tested at 1:1000 dilution. The sera were then tested for the specificity of any HLA antibodies present using Luminex bead based single antigen screening, again, with kits from OneLambda Inc. These kits use the same luminex beads but with 99 bead groups used in the Class I specific kit and 85 in the Class II specific kit. Here each bead group is coated with molecules of a single HLA specificity. The HLA molecules for these kits are recombinant in nature, which may effect their final conformation. The sera were tested at 1:1000 dilution, in human AB serum, to reduce non-specific background binding to the beads. The analysis was again performed using the HLA Visual software and the results are presented as MFI in which the internal negative control MFI is subtracted. MFI >1000 was recorded as specific HLA antibody to the antigen coated bead.

[2774] High antibody levels were elicited to all the immunizing HLA-I and II recombinant antigens at a serum dilution of 1:100 in groups 1, 2 and 5 and these were absent in the pre-immunization sera. These antibodies were not detected in group 3 (without HLA antigens) or in the unimmunized group 4 animals. However, at a serum dilution of 1:1000 only groups 1 and 2 showed significant antibody levels expressed as MFI (FIG. 5).

[2775] As the recombinant HLA antigens were not previously used for immunization, the sera from groups 1 and 2 were analysed by the Luminex HLA multibead antibody (LHMA) for HLA class I and II. Significant correlation was found between antibodies to HLA-DR4 immunizing antigen and the LHMA assay with sera from both group 1 (p=0.009) and group 2 (p=0.028) immunized macaques (FIG. 6A, B). Whereas antibodies to all 5 HLA-I and the HLA-2 immunizing antigens showed significant correlation with the LHAM assay in group 2 (FIG. 6B, D; range p=0.017-p=0.0002), this was not found in the sera from group 1 animals (FIG. 6A, C, representative illustrations of HLA-I A02). These results are consistent with the recombinant HLA-I and II construct expressing conformational structures recognized by the LHMA assay in group 2 sera (FIG. 6C). The significance of HLA-class I antibodies was strengthened by the significant inverse correlation of group 2 macaques with the peak viral load of all 5 HLA-I alleles (p=from 0.01 to 0.0001) and with the cumulative viral load of HLA-A1, A2 and A24 (p=from 0.045 to 0.0004). However, HLA-DR4 antibodies failed to show any correlation with the viral load. HLA-I antibodies were also significantly correlated with the neutralizing activity (see below) in group 2 (p=0.032), and so did HLA-II antibodies (p=0.025).

Measurement of Neutralizing Activity of Sera from Immunized Macaques

[2776] Macaque sera obtained at time points before, during, and after the immunization regime were tested for their relative in vitro neutralizing activity against the challenge virus SHIV.SF162 P4. Macaque sera were tested for their neutralization activity against SHIV.SF162 P4 propagated on C8166.CCR5 cells, using a TZM-bl based assay. Neutralization activity in serum was analyzed both in the presence of complement, using serum from a healthy AB+ blood donor as a source of complement, and in the absence of complement, using heat-inactivated AB+ serum. To inhibit replication of the virus in TZM-bl cells, a final concentration of 1 μM indinavir (AIDS reagent program #8145) was added to Iscove's modified Dulbecco medium supplemented with 10% AB+ serum, penicillin (100 U/ml), streptomycin (100 μg/ml), and DEAE dextran (37.5 μg/ml).

[2777] TZM-bl cells were seeded one day in advance at 4.000 cells per well. A final inoculum of 20 TCID₅₀ SHIV.SF162 P4 in a volume of 50 μl was incubated for 1 h at 37° C. with twofold serial dilutions of macaque serum (range 1:40-1:1280), and was then added to the TZM-bl cells. Peptide competition assays were performed as described above, except that serum dilutions were pre-incubated with BaL V3 peptide (TRPNNNTRKSIHIGPGRAFYTTG) or scrambled peptide (NKGTHNIPTARNIYGFPTSRRGT) at a final concentration of 20 μg/ml for 30 min at 37° C. before the addition of virus. After 4 h incubation at 37° C., TZM-bl cells were washed once with 150 μl phosphate-buffered saline (PBS), and subsequently replenished in 200 μl IMDM supplemented with 10% fetal bovine serum, penicillin (100 U/ml), streptomycin (100 μg/ml), and DEAE dextran (37.5 μg/ml). After 48 hours, the cells were again washed in 150 μl PBS. Next, 25 μl freshly prepared luciferase substrate (0.83 mM ATP, 0.83 mM d-luciferin [Duchefa Biochemie B.V., Haarlem, The Netherlands], 18.7 mM MgCl₂, 0.78 μM Na₂H₂P₂O₇, 38.9 mM Tris [pH 7.8], 0.39% [vol/vol] glycerol, 0.03% [vol/vol] Triton X-100, and 2.6 μM dithiothreitol) was added and luminescence was measured for 1 s per well. Experiments were performed in triplicate. For calculations, the background luciferase expression was subtracted from the relative light units (RLU) of the test wells. The percent neutralization was calculated by determining the reduction in luciferase expression in the presence of neutralizing agent compared to the cultures with virus only. When possible, 50% inhibitory concentrations (IC₅₀) were determined by linear regression. For calculations, viruses with IC₅₀s of <40 or >1280 were assigned a value of 20 or 1280, respectively.

[2778] Sera from group 1 and group 2 macaques, both immunized with HLA-I and II containing vaccine, neutralizing activity was observed only in the presence of complement, indicating that the anti-viral activity in these sera may have been mediated by anti-HLA antibodies (FIG. 7A). In contrast, sera from group 3 animals, immunized with HIVgp140 and SIVp27 but not with HLA antigens yielded significant neutralizing activity without (FIG. 7B) or with (FIG. 7A) complement. Neutralizing activity in serum became detectable after the second immunization, and was enhanced in some but not all animals after the third and/or fourth immunization. No inhibition of a VSV-G pseudotyped HIV variant was observed by group 1 and group 2 sera in the presence of complement (data not shown), indicating that the observed neutralizing activity in group 1 and group 2 sera was not the result of an effect of these sera on the viability of the target cells in the neutralization assay. Furthermore, neutralizing activity of sera from 5/8 group 3 animals was inhibited in the presence of BaL V3 peptides, suggesting that the activity in these sera may be directed against the viral envelope. In contrast, the neutralizing activity in sera from group 2 animals was not reduced in the presence of BaL V3 peptides. Together with the lack of neutralizing activity in group 2 sera in the absence of complement, these results indicate that the immunization regime in group 2 animals has not elicited anti-Env neutralizing antibodies at levels that can be detected in this assay. However, the neutralization titers of sera from group 3 animals were lower compared to titers of sera from group 1 and 2 animals. Neutralization activity of sera from group 5 animals obtained after the last immunization was only slightly enhanced in the presence of complement compared to sera from the control animals (FIG. 7A), suggesting that the Titermax adjuvant was essential for the development of a potent neutralizing activity.

[2779] The next point addressed was whether the differential peak and cumulative viral load after challenge in the 5 groups of macaques, may have been the result of inhibition of the challenge virus SHIV SF162.P4 by the neutralizing activity elicited in response to immunization. To this end, we examined any correlation between the complement dependent neutralizing activity IC₅₀ of sera obtained at the time of viral challenge against SHIV.SF162 P4 and the viral load at several time points after viral challenge. The neutralizing activity showed significant inverse correlation with the peak viral load only in group 2 animals (P=0.043, FIG. 7C) suggesting that the presence of anti-viral activity in serum may have influenced the early stages of viral replication. The cumulative viral load, however failed to be significantly correlated with the neutralizing activity (FIG. 7D). It is noteworthy that the neutralizing activity was also significantly correlated with HLA-class I antibodies only in group 2 sera (n=0.032), unlike those of HLA-class 2, which showed significant correlation with sera in group 1 (p=0.025) and 2 (p=0.006).

[2780] These data demonstrates that a pharmamer vaccine composition comprising 5 different biologically active molecules (HLA I-peptide complexes, HLA II molecule, SIVp27, truncated HSP70 and gp140trimer) attached to one or more of 4 Dextran270 multimerization domains can induce an immune response against SHIV. Systemic immunization (SC ×4) with a vaccine composition comprising 4 pharmamers comprising 1-3 of the 5 biologically active molecules denoted above and comprising the adjuvant Titermax Gold in group 2 macaques elicited a significant decrease in both the peak viral load 2-3 weeks after IV challenge with SHIV SF162.P4 and the cumulative viral load over the whole period of 10 weeks (p<0.05). Two of the 8 animals remained uninfected. HLA-class I and II proteins were essential in protecting the macaques as Group 3 animals immunized without them showed no protection.

[2781] This indicates that such of pharmamer vaccine composition could be used for prophylactic treatment against HIV infection in uninfected individuals.

### Example 8

[2782] This is an example of generation of a pharmamers that can be used in a vaccine composition for treatment of SIV/HIV.

[2783] 4 different vaccine compositions are generated comprising between 1-4 pharmamers whereto 3-5 different biological active molecules are attached. The multimerization domain in all pharmamers is Streptavidin (SA) coupled Dextran (270 kDa) and the biologically active molecules are attached to the SA-Dextran backbone by a non-covalent interaction between SA and biotin on the biologically active molecules. In the following generation of the individual components in the pharmamers are described:

### Generation of Multimerization Domain:

[2784] Dextran270 are coupled with SA using the following procedure. Divinyl sulfone acid activated Dextran270 are mixed with SA in a molar ratio of 1:13 (Dextran270:SA) in buffer (0.025 M NaHCO3, 0.1 M NaCl) for 2 hours at 40° C. The final concentration of Dextran270 was 6 uM. Then the reaction was stopped by adding 10 vol % 0.165 M Cystein, incubation for 30 minutes at 40° C. Excess SA was removed by gelfiltration on a Superdex 200-column and the buffer exchanged to 0.1M NaCl; 10 mM CHES; pH 9.0.

[2785] The final product has between 8 and 9 SA molecules per Dextran molecule in average.

### Generation of Biotinylated Biologically Active Molecules:

[2786] Four different biotinylated MHC I-peptide complexes are generated:

[2787] HLA-A*0101(IVDCLTEMY) SEQ ID NO 9588), HLA-A*1101 (IVTDFSVIK) SEQ ID NO 9589), HLA-A*0201(GLIQLVEGV) SEQ ID NO 9590, HLA-A*0301(RIAAWMATY) SEQ ID NO 9591.

[2788] The protein coding sequences minus the signal peptide and transmembrane regions of all of the 4 human MHC class 1 heavy chain molecules are obtained from GenBank and the sequence backtranslated according to E. coli codon usage using www.entelechon.com. The gene is synthesized e.g. by PCR using 10 overlapping DNA primers (DNA Technology, Denmark) and KOD polymerase (EMD Chemicals, Novagen). Sequence is verified by repeated DNA sequencing (MWG Biotech, Ebersberg, Germany) and base errors introduced is corrected using Quick Change multi site-directed mutagenesis kit (Stratagene, La Jolla, Calif.) before cloning in pGarboczi (Garboczi et al 1992). A DNA-sequence encoding a C-terminal Cystein residue is introduced by site directed mutagenesis. Human beta2 Microblulin (β2m) (GenBank acc #CAG33347.1) is acquired and cloned. Recombinant MHC 1 heavy chain and β2m protein is produced by fermentation, isolated and purified by column chromatography.

[2789] MHC-peptide complexes aregenerated by in vitro refolding of heavy chain, β2m and peptide in a buffer containing reduced and oxidized glutathione as described for generation of MHC I-peptide complexes in example 6. Following refolding the MHC complexes are chemically biotinylated on the C-terminal cystein residue by treating them with Maleimide-biotin (EZ-link Maleimide-PEO2-Biotin). The reaction can be carried out in PBS, PH 7.0 for 2¹/2 hour at 4° C., with a Maleimide-biotin: MHC-peptide molar ratio equal to 1.5 (1.6 ug Maleimide-biotin per 100 ug B*0801-cys-peptide complex). Excess Maleimide-biotin are removed and the buffer optionally exchanged to e.g. 20 mM Tris-HCl, 50 mM NaCl, pH 8.0 by gel filtration in a G-25 column. Efficiency of biotinylation may be determined using a SDS PAGE shift assay with SA. 1 ug Maleimide-biotin treated MHC-peptide complex is incubated with 1.8 ug SA in 12 ul PBS, pH 7.0 for 1 hour at room temperature. Then the sample is analyzed by SDS PAGE together with samples of various concentrations of Maleimide-biotin treated B*0801-cys-peptide complex not incubated with SA and a sample with SA alone. The degree of biotinylation is estimated by comparing amount of monomer MHC-peptide complex when incubated with SA and without SA.

Generation of Biotinylated SIVp27, Trimer gp140, DR4 and Truncated HSP70 Molecules.

[2790] Trimeric HIVgp140, DR4, C-terminal fragment of HSP70 and SIVp27 molecules are generated as described in example 6 but with the following modification. A C-terminal cystein are introduced in all molecules e.g. by introducing DNA bases encoding Cystein in the C-terminal of the molecules e.g. by sitedirected mutagenesis or by PCR with primers encoding a C-terminal cystein. Following expression, folding and purification of these molecules as described in example 6 the molecules are chemically biotinylated e.g. using the procedure described above for MJHC I-peptide complexes.

### Linking the Biologically Active Molecules to Multimerization Domain

[2791] The following pharmamer constructs are made:
[2792] 1) Dextran270+HLA-A*0101(IVDCLTEMY) (SEQ ID NO 9588)+DR4+HSP70 (molar ratio 1:10:10:4)
[2793] 2) Dextran270+HLA-A*0201(GLIQLVEGV) (SEQ ID NO 9590)+HLA-A*0301(RIAAWMATY) (SEQ ID NO 9591)+HSP70 (molar ratio 1:10:10:4) 3) Dextran270+HLA-A*1101 (IVTDFSVIK) SEQ ID NO 9589)+HSP70 (molar ratio 1:10:4)
[2794] 4) Dextran270+HIVgp140+Sivp27+HSP70 (molar ratio 1:3:10:4)

[2795] The 4 constructs are made by mixing Dextran270 with the above said biotinylated biological molecules (HLA I-peptide complexes, DR4 molecules, trimeric HIVgp140, SIVp27 and/or HSP70 (359-609)) in molar ratios as described. The final concentration of Dextran is 0.005-0.1 M.

[2796] These pharmamers may be used in a composition for vaccination of individuals with HIV or vaccination of healthy individuals for preventing infection with HIV, e.g. as described in example 7.

### Example 9

[2797] This is an example of generation of a pharmamers that can be used in a vaccine composition for treatment of a viral infection.

[2798] Different vaccine compositions are generated comprising between one or more pharmamers whereto 1-8 different biological active molecules are attached. One or more of the biologically active molecules may derive from the virus in question. One or more other biologically active molecules may be immunologically active molecules. The multimerization domain in all pharmamers is Streptavidin (SA) coupled Dextran (270 kDa) and the biologically active molecules are attached to the SA-Dextran backbone by a non-covalent interaction between SA and biotin on the biologically active molecules.

### Generation of Biologically Active Molecules

[2799] The biologically active molecules are generated by cloning, expression and purification in suitable expression systems known by persons skilled in the art. A C-terminal cystein residue is introduced in all molecules by fusing the dNA sequence encoding the biological molecules in question to a DNA sequence encoding a cystein residue. Following purification of the biologically active molecules they are chemically biotinylated e.g. using the procedure described in example 6.

### Generation of Multimerization Domain:

[2800] Dextran270 or another larger or smaller Dextran molecule are activated with Divinyl sulfone acid and coupled with SA using a procedure like the one described in example 6. The amount of SA molecules coupled to the Dextran may be adjusted by altering the molar ratio between activated Dextran and SA during coupling.

### Linking the Biologically Active Molecules to Multimerization Domain

[2801] Biotinylated biologically activated molecules are attached to the SA-Dextran by incubation at room temperature for 10 minutes or longer. The amount of each molecule attached to the SA-Dextran may be adjusted by adjusting the molar ratio between SA-Dextran and the biologically active molecule and/or the ratio between the individual biologically active molecules.

or HSP70 (359-609)) in molar ratios as described. The final concentration of Dextran is 0.005-0.1 M.

[2802] Such pharmamers may be used in a composition for vaccination of individuals with a viral infection or vaccination of healthy individuals for preventing infection with the virus in question, e.g. following a procedure as described in example 7 or elsewhere herein.

### Example 10

[2803] This is an example of how pharmamers with MHC-peptide complexes attached can be used as a borrelia vaccine for monkeys.

[2804] The vaccine is composed of a Dextran (270 kDa) multimerization domain that has been derivatized by attaching Strepavidin (on average 8.6 Strepavidin molecules/Dextran molecule).

[2805] Attached to the carrier are human HLA class 1 and 2 molecules containing antigenic peptides derived from the Borrelia antigen Basic membrane protein A (BmpA). The attached HLA-peptide complexes are:

[2806] HLA-A*0201(YLAPDNVIT), HLA-A*0101(YSDEIDIIH), HLA-B*0702(APDNVITST), HLA-DRB1*0401(IELVLKESSSNSYLS), HLA-BRB1*1501(MNKILLLILLESIVF) and HLA-DRB1*1101(SDLIWLIGYRFSDVA).

[2807] A single full dose of the final vaccine corresponds to, 100 μg of each MHC class 1; 113.5 ug of HLA class 2; 3×25.8 μg HSP70 and 3×162.2 μg dextran (corresponding to a total of approx 300 μg MHC multimer/kg body weight for a monkey of 3.5 kg) and consist of a 1:1:1 mixture of the following three MHC multimers:

### MHC Multimer 1:

[2808] HLA-A*0101(YSDEIDIIH)+HLA-DR*0401(IELVLKESSSNSYLS)+HSP70+Dextran carrier, in the molar ratio 10/10/4/1

### MHC Multimer 2:

[2809] HLA-A*0201(YLAPDNVIT)+HLA-DR*1501(MNKILLLILLESIVF)+HSP70+Dextran carrier, in the molar ratio 10/10/4/1

### MHC Multimer 2:

[2810] HLA-B*0702(APDNVITST)+HLA-DRB1*1101(SDLIWLIGYRFSDVA)+HSP70+Dextran carrier, in the molar ratio 10/10/4/1

### Administration:

[2811] The MHC multimer mix is emulsified with the adjuvant Titermax Gold as specified by the manufacturer and administered as intramuscular injections at time points 0, 4, 8, and 16 weeks such that a full dose is given at 0 weeks and half-full dose at 4, 8, and 16 5 weeks. This vaccine may give protection against infection with Borrelia bacteria.

[2812] The biological effect of the vaccination may be determined using immune monitoring assays.

[2813] A pharmamer composition as described above may also be used for vaccination of human against Borrelia infection. In humans the adjuvant Titermax Gold should be replaced with an adjutant for human use.

### Example 11

[2814] This is an example of how pharmamers with MHC-peptide complexes attached can be used as a borrelia vaccine for monkeys.

[2815] The vaccine is composed of an antigen presenting cell (APC) e.g. a Dendritic cell expressing the HLA class 1 molecules HLA-A*0101 and HLA-B*0702. The APC is loaded with antigenic peptides derived from the Borrelia protein Basic membrane protein A (BmpA) by incubation with the peptides for 2-5 hours at 37° C. The amino acid sequence of the peptides are YSDEIDIIH and APDNVITST.

### Administration:

[2816] The peptide loaded APC are added the adjuvant Titermax Gold as specified by the manufacturer and administered as intramuscular injections at time points 0, 4, 8, and 16 weeks. This vaccine may give protection against infection with Borrelia bacteria. The biological effect of the vaccination may be determined using immune monitoring assays as described elsewhere herein

[2817] A pharmamer composition as described above may also be used for vaccination of human against Borrelia infection. In humans the adjuvant Titermax Gold should be replaced with an adjutant for human use.

The application's sequence listing, which the Patent Office published only in electronic form, follows.

SEQUENCE LISTING (9592 sequences)

SEQ ID NO: 1 - protein, 8 aa, HIV-1
MGARASVL

SEQ ID NO: 2 - protein, 8 aa, HIV-1
SVLSGGEL

SEQ ID NO: 3 - protein, 8 aa, HIV-1
ELDRWEKI

SEQ ID NO: 4 - protein, 8 aa, HIV-1
RWEKIRLR

SEQ ID NO: 5 - protein, 8 aa, HIV-1
RLRPGGKK

SEQ ID NO: 6 - protein, 8 aa, HIV-1
KLKHIVWA

SEQ ID NO: 7 - protein, 8 aa, HIV-1
IVWASREL

SEQ ID NO: 8 - protein, 8 aa, HIV-1
WASRELER

SEQ ID NO: 9 - protein, 8 aa, HIV-1
RELERFAV

SEQ ID NO: 10 - protein, 8 aa, HIV-1
FAVNPGLL

SEQ ID NO: 11 - protein, 8 aa, HIV-1
SEGCRQIL

SEQ ID NO: 12 - protein, 8 aa, HIV-1
QLQPSLQT

SEQ ID NO: 13 - protein, 8 aa, HIV-1
LQTGSEEL

SEQ ID NO: 14 - protein, 8 aa, HIV-1
QTGSEELR

SEQ ID NO: 15 - protein, 8 aa, HIV-1
SLYNTVAT

SEQ ID NO: 16 - protein, 8 aa, HIV-1
LYNTVATL

SEQ ID NO: 17 - protein, 8 aa, HIV-1
YNTVATLY

SEQ ID NO: 18 - protein, 8 aa, HIV-1
TVATLYCV

SEQ ID NO: 19 - protein, 8 aa, HIV-1
TLYCVHQR

SEQ ID NO: 20 - protein, 8 aa, HIV-1
LYCVHQRI

SEQ ID NO: 21 - protein, 8 aa, HIV-1
DTKEALDK

SEQ ID NO: 22 - protein, 8 aa, HIV-1
KIEEEQNK

SEQ ID NO: 23 - protein, 8 aa, HIV-1
DTGHSNQV

SEQ ID NO: 24 - protein, 8 aa, HIV-1
QVSQNYPI

SEQ ID NO: 25 - protein, 8 aa, HIV-1
NYPIVQNI

SEQ ID NO: 26 - protein, 8 aa, HIV-1
YPIVQNIQ

SEQ ID NO: 27 - protein, 8 aa, HIV-1
GQMVHQAI

SEQ ID NO: 28 - protein, 8 aa, HIV-1
SPRTLNAW

SEQ ID NO: 29 - protein, 8 aa, HIV-1
RTLNAWVK

SEQ ID NO: 30 - protein, 8 aa, HIV-1
TLNAWVKV

SEQ ID NO: 31 - protein, 8 aa, HIV-1
WVKVVEEK

SEQ ID NO: 32 - protein, 8 aa, HIV-1
KVVEEKAF

SEQ ID NO: 33 - protein, 8 aa, HIV-1
EKAFSPEV

SEQ ID NO: 34 - protein, 8 aa, HIV-1
FSPEVIPM

SEQ ID NO: 35 - protein, 8 aa, HIV-1
SPEVIPMF

SEQ ID NO: 36 - protein, 8 aa, HIV-1
EVIPMFSA

SEQ ID NO: 37 - protein, 8 aa, HIV-1
VIPMFSAL

SEQ ID NO: 38 - protein, 8 aa, HIV-1
IPMFSALS

SEQ ID NO: 39 - protein, 8 aa, HIV-1
FSALSEGA

SEQ ID NO: 40 - protein, 8 aa, HIV-1
ALSEGATP

SEQ ID NO: 41 - protein, 8 aa, HIV-1
TPQDLNTM

SEQ ID NO: 42 - protein, 8 aa, HIV-1
NTVGGHQA

SEQ ID NO: 43 - protein, 8 aa, HIV-1
TVGGHQAA

SEQ ID NO: 44 - protein, 8 aa, HIV-1
HQAAMQML

SEQ ID NO: 45 - protein, 8 aa, HIV-1
QAAMQMLK

SEQ ID NO: 46 - protein, 8 aa, HIV-1
MQMLKETI

SEQ ID NO: 47 - protein, 8 aa, HIV-1
ETINEEAA

SEQ ID NO: 48 - protein, 8 aa, HIV-1
EEAAEWDR

SEQ ID NO: 49 - protein, 8 aa, HIV-1
EAAEWDRV

SEQ ID NO: 50 - protein, 8 aa, HIV-1
EWDRVHPV

SEQ ID NO: 51 - protein, 8 aa, HIV-1
HPVHAGPI

SEQ ID NO: 52 - protein, 8 aa, HIV-1
GPIAPGQM

SEQ ID NO: 53 - protein, 8 aa, HIV-1
WMTNNPPI

SEQ ID NO: 54 - protein, 8 aa, HIV-1
TNNPPIPV

SEQ ID NO: 55 - protein, 8 aa, HIV-1
PPIPVGEI

SEQ ID NO: 56 - protein, 8 aa, HIV-1
PIPVGEIY

SEQ ID NO: 57 - protein, 8 aa, HIV-1
GEIYKRWI

SEQ ID NO: 58 - protein, 8 aa, HIV-1
EIYKRWII

SEQ ID NO: 59 - protein, 8 aa, HIV-1
IYKRWIIL

SEQ ID NO: 60 - protein, 8 aa, HIV-1
KRWIILGL

SEQ ID NO: 61 - protein, 8 aa, HIV-1
WIILGLNK

SEQ ID NO: 62 - protein, 8 aa, HIV-1
IILGLNKI

SEQ ID NO: 63 - protein, 8 aa, HIV-1
ILGLNKIV

SEQ ID NO: 64 - protein, 8 aa, HIV-1
LGLNKIVR

SEQ ID NO: 65 - protein, 8 aa, HIV-1
GLNKIVRM

SEQ ID NO: 66 - protein, 8 aa, HIV-1
IVRMYSPT

SEQ ID NO: 67 - protein, 8 aa, HIV-1
RMYSPTSI

SEQ ID NO: 68 - protein, 8 aa, HIV-1
MYSPTSIL

SEQ ID NO: 69 - protein, 8 aa, HIV-1
SPTSILDI

SEQ ID NO: 70 - protein, 8 aa, HIV-1
RQGPKEPF

SEQ ID NO: 71 - protein, 8 aa, HIV-1
DYVDRFYK

SEQ ID NO: 72 - protein, 8 aa, HIV-1
YVDRFYKT

SEQ ID NO: 73 - protein, 8 aa, HIV-1
DRFYKTLR

SEQ ID NO: 74 - protein, 8 aa, HIV-1
AEQASQEV

SEQ ID NO: 75 - protein, 8 aa, HIV-1
EQASQEVK

SEQ ID NO: 76 - protein, 8 aa, HIV-1
ASQEVKNW

SEQ ID NO: 77 - protein, 8 aa, HIV-1
EVKNWMTE

SEQ ID NO: 78 - protein, 8 aa, HIV-1
NWMTETLL

SEQ ID NO: 79 - protein, 8 aa, HIV-1
WMTETLLV

SEQ ID NO: 80 - protein, 8 aa, HIV-1
ETLLVQNA

SEQ ID NO: 81 - protein, 8 aa, HIV-1
NPDCKTIL

SEQ ID NO: 82 - protein, 8 aa, HIV-1
ILKALGPA

SEQ ID NO: 83 - protein, 8 aa, HIV-1
ALGPAATL

SEQ ID NO: 84 - protein, 8 aa, HIV-1
TLEEMMTA

SEQ ID NO: 85 - protein, 8 aa, HIV-1
EEMMTACQ

SEQ ID NO: 86 - protein, 8 aa, HIV-1
MMTACQGV

SEQ ID NO: 87 - protein, 8 aa, HIV-1
GVGGPGHK

SEQ ID NO: 88 - protein, 8 aa, HIV-1
VLAEAMSQ

SEQ ID NO: 89 - protein, 8 aa, HIV-1
AEAMSQVT

SEQ ID NO: 90 - protein, 8 aa, HIV-1
SQVTNSAT

SEQ ID NO: 91 - protein, 8 aa, HIV-1
VTNSATIM

SEQ ID NO: 92 - protein, 8 aa, HIV-1
SATIMMQR

SEQ ID NO: 93 - protein, 8 aa, HIV-1
IMMQRGNF

SEQ ID NO: 94 - protein, 8 aa, HIV-1
MMQRGNFR

SEQ ID NO: 95 - protein, 8 aa, HIV-1
RGNFRNQR

SEQ ID NO: 96 - protein, 8 aa, HIV-1
RNQRKIVK

SEQ ID NO: 97 - protein, 8 aa, HIV-1
HTARNCRA

SEQ ID NO: 98 - protein, 8 aa, HIV-1
RNCRAPRK

SEQ ID NO: 99 - protein, 8 aa, HIV-1
NCRAPRKK

SEQ ID NO: 100 - protein, 8 aa, HIV-1
APRKKGCW

SEQ ID NO: 101 - protein, 8 aa, HIV-1
QMKDCTER

SEQ ID NO: 102 - protein, 8 aa, HIV-1
CTERQANF

SEQ ID NO: 103 - protein, 8 aa, HIV-1
TERQANFL

SEQ ID NO: 104 - protein, 8 aa, HIV-1
ERQANFLR

SEQ ID NO: 105 - protein, 8 aa, HIV-1
RQANFLRE

SEQ ID NO: 106 - protein, 8 aa, HIV-1
FLREDLAF

SEQ ID NO: 107 - protein, 8 aa, HIV-1
DLAFLQGK

SEQ ID NO: 108 - protein, 8 aa, HIV-1
AFLQGKAR

SEQ ID NO: 109 - protein, 8 aa, HIV-1
FLQGKARE

SEQ ID NO: 110 - protein, 8 aa, HIV-1
LQGKAREF

SEQ ID NO: 111 - protein, 8 aa, HIV-1
REFSSEQT

SEQ ID NO: 112 - protein, 8 aa, HIV-1
EFSSEQTR

SEQ ID NO: 113 - protein, 8 aa, HIV-1
FSSEQTRA

SEQ ID NO: 114 - protein, 8 aa, HIV-1
QTRANSPT

SEQ ID NO: 115 - protein, 8 aa, HIV-1
RANSPTRR

SEQ ID NO: 116 - protein, 8 aa, HIV-1
GADRQGTV

SEQ ID NO: 117 - protein, 8 aa, HIV-1
TVSFNFPQ

SEQ ID NO: 118 - protein, 8 aa, HIV-1
VSFNFPQV

SEQ ID NO: 119 - protein, 8 aa, HIV-1
FNFPQVTL

SEQ ID NO: 120 - protein, 8 aa, HIV-1
NFPQVTLW

SEQ ID NO: 121 - protein, 8 aa, HIV-1
TLWQRPLV

SEQ ID NO: 122 - protein, 8 aa, HIV-1
WQRPLVTI

SEQ ID NO: 123 - protein, 8 aa, HIV-1
RPLVTIKI

SEQ ID NO: 124 - protein, 8 aa, HIV-1
GQLKEALL

SEQ ID NO: 125 - protein, 8 aa, HIV-1
TGADDTVL

SEQ ID NO: 126 - protein, 8 aa, HIV-1
TVLEEMSL

SEQ ID NO: 127 - protein, 8 aa, HIV-1
EEMSLPGR

SEQ ID NO: 128 - protein, 8 aa, HIV-1
MSLPGRWK

SEQ ID NO: 129 - protein, 8 aa, HIV-1
SLPGRWKP

SEQ ID NO: 130 - protein, 8 aa, HIV-1
KPKMIGGI

SEQ ID NO: 131 - protein, 8 aa, HIV-1
GIGGFIKV

SEQ ID NO: 132 - protein, 8 aa, HIV-1
RQYDQILI

SEQ ID NO: 133 - protein, 8 aa, HIV-1
EICGHKAI

SEQ ID NO: 134 - protein, 8 aa, HIV-1
HKAIGTVL

SEQ ID NO: 135 - protein, 8 aa, HIV-1
KAIGTVLV

SEQ ID NO: 136 - protein, 8 aa, HIV-1
VLVGPTPV

SEQ ID NO: 137 - protein, 8 aa, HIV-1
GPTPVNII

SEQ ID NO: 138 - protein, 8 aa, HIV-1
TPVNIIGR

SEQ ID NO: 139 - protein, 8 aa, HIV-1
NIIGRNLL

SEQ ID NO: 140 - protein, 8 aa, HIV-1
NLLTQIGC

SEQ ID NO: 141 - protein, 8 aa, HIV-1
LNFPISPI

SEQ ID NO: 142 - protein, 8 aa, HIV-1
FPISPIET

SEQ ID NO: 143 - protein, 8 aa, HIV-1
PISPIETV

SEQ ID NO: 144 - protein, 8 aa, HIV-1
SPIETVPV

SEQ ID NO: 145 - protein, 8 aa, HIV-1
IETVPVKL

SEQ ID NO: 146 - protein, 8 aa, HIV-1
ETVPVKLK

SEQ ID NO: 147 - protein, 8 aa, HIV-1
VPVKLKPG

SEQ ID NO: 148 - protein, 8 aa, HIV-1
KVKQWPLT

SEQ ID NO: 149 - protein, 8 aa, HIV-1
KQWPLTEE

SEQ ID NO: 150 - protein, 8 aa, HIV-1
WPLTEEKI

SEQ ID NO: 151 - protein, 8 aa, HIV-1
TEEKIKAL

SEQ ID NO: 152 - protein, 8 aa, HIV-1
EEKIKALV

SEQ ID NO: 153 - protein, 8 aa, HIV-1
KIKALVEI

SEQ ID NO: 154 - protein, 8 aa, HIV-1
LVEICTEM

SEQ ID NO: 155 - protein, 8 aa, HIV-1
EICTEMEK

SEQ ID NO: 156 - protein, 8 aa, HIV-1
KIGPENPY

SEQ ID NO: 157 - protein, 8 aa, HIV-1
ENPYNTPV

SEQ ID NO: 158 - protein, 8 aa, HIV-1
NPYNTPVF

SEQ ID NO: 159 - protein, 8 aa, HIV-1
YNTPVFAI

SEQ ID NO: 160 - protein, 8 aa, HIV-1
NTPVFAIK

SEQ ID NO: 161 - protein, 8 aa, HIV-1
TPVFAIKK

SEQ ID NO: 162 - protein, 8 aa, HIV-1
PVFAIKKK

SEQ ID NO: 163 - protein, 8 aa, HIV-1
STKWRKLV

SEQ ID NO: 164 - protein, 8 aa, HIV-1
KWRKLVDF

SEQ ID NO: 165 - protein, 8 aa, HIV-1
KLVDFREL

SEQ ID NO: 166 - protein, 8 aa, HIV-1
DFRELNKR

SEQ ID NO: 167 - protein, 8 aa, HIV-1
RTQDFWEV

SEQ ID NO: 168 - protein, 8 aa, HIV-1
QLGIPHPA

SEQ ID NO: 169 - protein, 8 aa, HIV-1
GIPHPAGL

SEQ ID NO: 170 - protein, 8 aa, HIV-1
IPHPAGLK

SEQ ID NO: 171 - protein, 8 aa, HIV-1
GLKKKKSV

SEQ ID NO: 172 - protein, 8 aa, HIV-1
VLDVGDAY

SEQ ID NO: 173 - protein, 8 aa, HIV-1
VGDAYFSV

SEQ ID NO: 174 - protein, 8 aa, HIV-1
DAYFSVPL

SEQ ID NO: 175 - protein, 8 aa, HIV-1
SVPLDEDF

SEQ ID NO: 176 - protein, 8 aa, HIV-1
PLDEDFRK

SEQ ID NO: 177 - protein, 8 aa, HIV-1
DFRKYTAF

SEQ ID NO: 178 - protein, 8 aa, HIV-1
RKYTAFTI

SEQ ID NO: 179 - protein, 8 aa, HIV-1
YTAFTIPS

SEQ ID NO: 180 - protein, 8 aa, HIV-1
TAFTIPSI

SEQ ID NO: 181 - protein, 8 aa, HIV-1
IPSINNET

SEQ ID NO: 182 - protein, 8 aa, HIV-1
NETPGIRY

SEQ ID NO: 183 - protein, 8 aa, HIV-1
ETPGIRYQ

SEQ ID NO: 184 - protein, 8 aa, HIV-1
TPGIRYQY

SEQ ID NO: 185 - protein, 8 aa, HIV-1
GIRYQYNV

SEQ ID NO: 186 - protein, 8 aa, HIV-1
IRYQYNVL

SEQ ID NO: 187 - protein, 8 aa, HIV-1
YQYNVLPQ

SEQ ID NO: 188 - protein, 8 aa, HIV-1
NVLPQGWK

SEQ ID NO: 189 - protein, 8 aa, HIV-1
IFQSSMTK

SEQ ID NO: 190 - protein, 8 aa, HIV-1
FQSSMTKI

SEQ ID NO: 191 - protein, 8 aa, HIV-1
MTKILEPF

SEQ ID NO: 192 - protein, 8 aa, HIV-1
TKILEPFR

SEQ ID NO: 193 - protein, 8 aa, HIV-1
KILEPFRK

SEQ ID NO: 194 - protein, 8 aa, HIV-1
KQNPDIVI

SEQ ID NO: 195 - protein, 8 aa, HIV-1
DIVIYQYM

SEQ ID NO: 196 - protein, 8 aa, HIV-1
IYQYMDDL

SEQ ID NO: 197 - protein, 8 aa, HIV-1
YQYMDDLY

SEQ ID NO: 198 - protein, 8 aa, HIV-1
QYMDDLYV

SEQ ID NO: 199 - protein, 8 aa, HIV-1
YMDDLYVG

SEQ ID NO: 200 - protein, 8 aa, HIV-1
DLYVGSDL

SEQ ID NO: 201 - protein, 8 aa, HIV-1
YVGSDLEI

SEQ ID NO: 202 - protein, 8 aa, HIV-1
DLEIGQHR

SEQ ID NO: 203 - protein, 8 aa, HIV-1
EIGQHRTK

SEQ ID NO: 204 - protein, 8 aa, HIV-1
RTKIEELR

SEQ ID NO: 205 - protein, 8 aa, HIV-1
IEELRQHL

SEQ ID NO: 206 - protein, 8 aa, HIV-1
EELRQHLL

SEQ ID NO: 207 - protein, 8 aa, HIV-1
ELRQHLLR

SEQ ID NO: 208 - protein, 8 aa, HIV-1
HLLRWGLT

SEQ ID NO: 209 - protein, 8 aa, HIV-1
LLRWGLTT

SEQ ID NO: 210 - protein, 8 aa, HIV-1
KEPPFLWM

SEQ ID NO: 211 - protein, 8 aa, HIV-1
PPFLWMGY

SEQ ID NO: 212 - protein, 8 aa, HIV-1
FLWMGYEL

SEQ ID NO: 213 - protein, 8 aa, HIV-1
GYELHPDK

SEQ ID NO: 214 - protein, 8 aa, HIV-1
YELHPDKW

SEQ ID NO: 215 - protein, 8 aa, HIV-1
ELHPDKWT

SEQ ID NO: 216 - protein, 8 aa, HIV-1
LHPDKWTV

SEQ ID NO: 217 - protein, 8 aa, HIV-1
WTVQPIVL

SEQ ID NO: 218 - protein, 8 aa, HIV-1
WTVNDIQK

SEQ ID NO: 219 - protein, 8 aa, HIV-1
TVNDIQKL

SEQ ID NO: 220 - protein, 8 aa, HIV-1
IQKLVGKL

SEQ ID NO: 221 - protein, 8 aa, HIV-1
KLVGKLNW

SEQ ID NO: 222 - protein, 8 aa, HIV-1
KLNWASQI

SEQ ID NO: 223 - protein, 8 aa, HIV-1
SQIYPGIK

SEQ ID NO: 224 - protein, 8 aa, HIV-1
QIYPGIKV

SEQ ID NO: 225 - protein, 8 aa, HIV-1
IYPGIKVR

SEQ ID NO: 226 - protein, 8 aa, HIV-1
KVRQLCKL

SEQ ID NO: 227 - protein, 8 aa, HIV-1
RQLCKLLR

SEQ ID NO: 228 - protein, 8 aa, HIV-1
KLLRGTKA

SEQ ID NO: 229 - protein, 8 aa, HIV-1
LLRGTKAL

SEQ ID NO: 230 - protein, 8 aa, HIV-1
GTKALTEV

SEQ ID NO: 231 - protein, 8 aa, HIV-1
ALTEVIPL

SEQ ID NO: 232 - protein, 8 aa, HIV-1
EVIPLTEE

SEQ ID NO: 233 - protein, 8 aa, HIV-1
PLTEEAEL

SEQ ID NO: 234 - protein, 8 aa, HIV-1
TEEAELEL

SEQ ID NO: 235 - protein, 8 aa, HIV-1
EEAELELA

SEQ ID NO: 236 - protein, 8 aa, HIV-1
ELELAENR

SEQ ID NO: 237 - protein, 8 aa, HIV-1
ELAENREI

SEQ ID NO: 238 - protein, 8 aa, HIV-1
REILKEPV

SEQ ID NO: 239 - protein, 8 aa, HIV-1
KEPVHGVY

SEQ ID NO: 240 - protein, 8 aa, HIV-1
EPVHGVYY

SEQ ID NO: 241 - protein, 8 aa, HIV-1
GVYYDPSK

SEQ ID NO: 242 - protein, 8 aa, HIV-1
YYDPSKDL

SEQ ID NO: 243 - protein, 8 aa, HIV-1
DLIAEIQK

SEQ ID NO: 244 - protein, 8 aa, HIV-1
AEIQKQGQ

SEQ ID NO: 245 - protein, 8 aa, HIV-1
KQGQGQWT

SEQ ID NO: 246 - protein, 8 aa, HIV-1
GQGQWTYQ

SEQ ID NO: 247 - protein, 8 aa, HIV-1
GQWTYQIY

SEQ ID NO: 248 - protein, 8 aa, HIV-1
YQIYQEPF

SEQ ID NO: 249 - protein, 8 aa, HIV-1
QIYQEPFK

SEQ ID NO: 250 - protein, 8 aa, HIV-1
YQEPFKNL

SEQ ID NO: 251 - protein, 8 aa, HIV-1
NLKTGKYA

SEQ ID NO: 252 - protein, 8 aa, HIV-1
KTGKYARM

SEQ ID NO: 253 - protein, 8 aa, HIV-1
TGKYARMR

SEQ ID NO: 254 - protein, 8 aa, HIV-1
RMRGAHTN

SEQ ID NO: 255 - protein, 8 aa, HIV-1
HTNDVKQL

SEQ ID NO: 256 - protein, 8 aa, HIV-1
QLTEAVQK

SEQ ID NO: 257 - protein, 8 aa, HIV-1
KITTESIV

SEQ ID NO: 258 - protein, 8 aa, HIV-1
TTESIVIW

SEQ ID NO: 259 - protein, 8 aa, HIV-1
ESIVIWGK

SEQ ID NO: 260 - protein, 8 aa, HIV-1
VIWGKTPK

SEQ ID NO: 261 - protein, 8 aa, HIV-1
IWGKTPKF

SEQ ID NO: 262 - protein, 8 aa, HIV-1
TPKFKLPI

SEQ ID NO: 263 - protein, 8 aa, HIV-1
KFKLPIQK

SEQ ID NO: 264 - protein, 8 aa, HIV-1
LPIQKETW

SEQ ID NO: 265 - protein, 8 aa, HIV-1
IQKETWET

SEQ ID NO: 266 - protein, 8 aa, HIV-1
KETWETWW

SEQ ID NO: 267 - protein, 8 aa, HIV-1
ETWETWWT

SEQ ID NO: 268 - protein, 8 aa, HIV-1
WETWWTEY

SEQ ID NO: 269 - protein, 8 aa, HIV-1
ETWWTEYW

SEQ ID NO: 270 - protein, 8 aa, HIV-1
TEYWQATW

SEQ ID NO: 271 - protein, 8 aa, HIV-1
EYWQATWI

SEQ ID NO: 272 - protein, 8 aa, HIV-1
WQATWIPE

SEQ ID NO: 273 - protein, 8 aa, HIV-1
QATWIPEW

SEQ ID NO: 274 - protein, 8 aa, HIV-1
TWIPEWEF

SEQ ID NO: 275 - protein, 8 aa, HIV-1
WIPEWEFV

SEQ ID NO: 276 - protein, 8 aa, HIV-1
FVNTPPLV

SEQ ID NO: 277 - protein, 8 aa, HIV-1
NTPPLVKL

SEQ ID NO: 278 - protein, 8 aa, HIV-1
TPPLVKLW

SEQ ID NO: 279 - protein, 8 aa, HIV-1
PPLVKLWY

SEQ ID NO: 280 - protein, 8 aa, HIV-1
PLVKLWYQ

SEQ ID NO: 281 - protein, 8 aa, HIV-1
LVKLWYQL

SEQ ID NO: 282 - protein, 8 aa, HIV-1
KLWYQLEK

SEQ ID NO: 283 - protein, 8 aa, HIV-1
YQLEKEPI

SEQ ID NO: 284 - protein, 8 aa, HIV-1
QLEKEPIV

SEQ ID NO: 285 - protein, 8 aa, HIV-1
EPIVGAET

SEQ ID NO: 286 - protein, 8 aa, HIV-1
IVGAETFY

SEQ ID NO: 287 - protein, 8 aa, HIV-1
VGAETFYV

SEQ ID NO: 288 - protein, 8 aa, HIV-1
ETFYVDGA

SEQ ID NO: 289 - protein, 8 aa, HIV-1
YVDGAANR

SEQ ID NO: 290 - protein, 8 aa, HIV-1
GAANRETK

SEQ ID NO: 291 - protein, 8 aa, HIV-1
KLGKAGYV

SEQ ID NO: 292 - protein, 8 aa, HIV-1
KAGYVTNR

SEQ ID NO: 293 - protein, 8 aa, HIV-1
GYVTNRGR

SEQ ID NO: 294 - protein, 8 aa, HIV-1
VTNRGRQK

SEQ ID NO: 295 - protein, 8 aa, HIV-1
GRQKVVTL

SEQ ID NO: 296 - protein, 8 aa, HIV-1
TLTDTTNQ

SEQ ID NO: 297 - protein, 8 aa, HIV-1
LTDTTNQK

SEQ ID NO: 298 - protein, 8 aa, HIV-1
TTNQKTEL

SEQ ID NO: 299 - protein, 8 aa, HIV-1
KTELQAIY

SEQ ID NO: 300 - protein, 8 aa, HIV-1
TELQAIYL

SEQ ID NO: 301 - protein, 8 aa, HIV-1
ELQAIYLA

SEQ ID NO: 302 - protein, 8 aa, HIV-1
LQAIYLAL

SEQ ID NO: 303 - protein, 8 aa, HIV-1
LQDSGLEV

SEQ ID NO: 304 - protein, 8 aa, HIV-1
SGLEVNIV

SEQ ID NO: 305 - protein, 8 aa, HIV-1
NIVTDSQY

SEQ ID NO: 306 - protein, 8 aa, HIV-1
IVTDSQYA

SEQ ID NO: 307 - protein, 8 aa, HIV-1
VTDSQYAL

SEQ ID NO: 308 - protein, 8 aa, HIV-1
SQYALGII

SEQ ID NO: 309 - protein, 8 aa, HIV-1
YALGIIQA

SEQ ID NO: 310 - protein, 8 aa, HIV-1
ALGIIQAQ

SEQ ID NO: 311 - protein, 8 aa, HIV-1
SELVNQII

SEQ ID NO: 312 - protein, 8 aa, HIV-1
NQIIEQLI

SEQ ID NO: 313 - protein, 8 aa, HIV-1
QIIEQLIK

SEQ ID NO: 314 - protein, 8 aa, HIV-1
IIEQLIKK

SEQ ID NO: 315 - protein, 8 aa, HIV-1
QLIKKEKV

SEQ ID NO: 316 - protein, 8 aa, HIV-1
LIKKEKVY

SEQ ID NO: 317 - protein, 8 aa, HIV-1
KEKVYLAW

SEQ ID NO: 318 - protein, 8 aa, HIV-1
EKVYLAWV

SEQ ID NO: 319 - protein, 8 aa, HIV-1
YLAWVPAH

SEQ ID NO: 320 - protein, 8 aa, HIV-1
LAWVPAHK

SEQ ID NO: 321 - protein, 8 aa, HIV-1
WVPAHKGI

SEQ ID NO: 322 - protein, 8 aa, HIV-1
GIGGNEQV

SEQ ID NO: 323 - protein, 8 aa, HIV-1
QVDKLVSA

SEQ ID NO: 324 - protein, 8 aa, HIV-1
KLVSAGIR

SEQ ID NO: 325 - protein, 8 aa, HIV-1
LVSAGIRK

SEQ ID NO: 326 - protein, 8 aa, HIV-1
GIRKVLFL

SEQ ID NO: 327 - protein, 8 aa, HIV-1
KVLFLDGI

SEQ ID NO: 328 - protein, 8 aa, HIV-1
LFLDGIDK

SEQ ID NO: 329 - protein, 8 aa, HIV-1
FLDGIDKA

SEQ ID NO: 330 - protein, 8 aa, HIV-1
KAQDEHEK

SEQ ID NO: 331 - protein, 8 aa, HIV-1
EKYHSNWR

SEQ ID NO: 332 - protein, 8 aa, HIV-1
YHSNWRAM

SEQ ID NO: 333 - protein, 8 aa, HIV-1
AMASDFNL

SEQ ID NO: 334 - protein, 8 aa, HIV-1
NLPPVVAK

SEQ ID NO: 335 - protein, 8 aa, HIV-1
PPVVAKEI

SEQ ID NO: 336 - protein, 8 aa, HIV-1
PVVAKEIV

SEQ ID NO: 337 - protein, 8 aa, HIV-1
EIVASCDK

SEQ ID NO: 338 - protein, 8 aa, HIV-1
CQLKGEAM

SEQ ID NO: 339 - protein, 8 aa, HIV-1
GEAMHGQV

SEQ ID NO: 340 - protein, 8 aa, HIV-1
AMHGQVDC

SEQ ID NO: 341 - protein, 8 aa, HIV-1
QVDCSPGI

SEQ ID NO: 342 - protein, 8 aa, HIV-1
CSPGIWQL

SEQ ID NO: 343 - protein, 8 aa, HIV-1
WQLDCTHL

SEQ ID NO: 344 - protein, 8 aa, HIV-1
HLEGKVIL

SEQ ID NO: 345 - protein, 8 aa, HIV-1
VILVAVHV

SEQ ID NO: 346 - protein, 8 aa, HIV-1
ILVAVHVA

SEQ ID NO: 347 - protein, 8 aa, HIV-1
AVHVASGY

SEQ ID NO: 348 - protein, 8 aa, HIV-1
GYIEAEVI

SEQ ID NO: 349 - protein, 8 aa, HIV-1
AEVIPAET

SEQ ID NO: 350 - protein, 8 aa, HIV-1
AETGQETA

SEQ ID NO: 351 - protein, 8 aa, HIV-1
ETGQETAY

SEQ ID NO: 352 - protein, 8 aa, HIV-1
GQETAYFL

SEQ ID NO: 353 - protein, 8 aa, HIV-1
QETAYFLL

SEQ ID NO: 354 - protein, 8 aa, HIV-1
ETAYFLLK

SEQ ID NO: 355 - protein, 8 aa, HIV-1
FLLKLAGR

SEQ ID NO: 356 - protein, 8 aa, HIV-1
KLAGRWPV

SEQ ID NO: 357 - protein, 8 aa, HIV-1
LAGRWPVK

SEQ ID NO: 358 - protein, 8 aa, HIV-1
GRWPVKTI

SEQ ID NO: 359 - protein, 8 aa, HIV-1
WPVKTIHT

SEQ ID NO: 360 - protein, 8 aa, HIV-1
HTDNGSNF

SEQ ID NO: 361 - protein, 8 aa, HIV-1
NFTGATVR

SEQ ID NO: 362 - protein, 8 aa, HIV-1
FTGATVRA

SEQ ID NO: 363 - protein, 8 aa, HIV-1
TGATVRAA

SEQ ID NO: 364 - protein, 8 aa, HIV-1
ATVRAACW

SEQ ID NO: 365 - protein, 8 aa, HIV-1
AACWWAGI

SEQ ID NO: 366 - protein, 8 aa, HIV-1
WAGIKQEF

SEQ ID NO: 367 - protein, 8 aa, HIV-1
GIKQEFGI

SEQ ID NO: 368 - protein, 8 aa, HIV-1
KQEFGIPY

SEQ ID NO: 369 - protein, 8 aa, HIV-1
NPQSQGVV

SEQ ID NO: 370 - protein, 8 aa, HIV-1
SQGVVESM

SEQ ID NO: 371 - protein, 8 aa, HIV-1
GVVESMNK

SEQ ID NO: 372 - protein, 8 aa, HIV-1
VESMNKEL

SEQ ID NO: 373 - protein, 8 aa, HIV-1
ESMNKELK

SEQ ID NO: 374 - protein, 8 aa, HIV-1
SMNKELKK

SEQ ID NO: 375 - protein, 8 aa, HIV-1
AEHLKTAV

SEQ ID NO: 376 - protein, 8 aa, HIV-1
KTAVQMAV

SEQ ID NO: 377 - protein, 8 aa, HIV-1
TAVQMAVF

SEQ ID NO: 378 - protein, 8 aa, HIV-1
VQMAVFIH

SEQ ID NO: 379 - protein, 8 aa, HIV-1
MAVFIHNF

SEQ ID NO: 380 - protein, 8 aa, HIV-1
AVFIHNFK

SEQ ID NO: 381 - protein, 8 aa, HIV-1
VFIHNFKR

SEQ ID NO: 382 - protein, 8 aa, HIV-1
FIHNFKRK

SEQ ID NO: 383 - protein, 8 aa, HIV-1
YSAGERIV

SEQ ID NO: 384 - protein, 8 aa, HIV-1
RIVDIIAT

SEQ ID NO: 385 - protein, 8 aa, HIV-1
IATDIQTK

SEQ ID NO: 386 - protein, 8 aa, HIV-1
IQTKELQK

SEQ ID NO: 387 - protein, 8 aa, HIV-1
LQKQITKI

SEQ ID NO: 388 - protein, 8 aa, HIV-1
QITKIQNF

SEQ ID NO: 389 - protein, 8 aa, HIV-1
ITKIQNFR

SEQ ID NO: 390 - protein, 8 aa, HIV-1
TKIQNFRV

SEQ ID NO: 391 - protein, 8 aa, HIV-1
KIQNFRVY

SEQ ID NO: 392 - protein, 8 aa, HIV-1
IQNFRVYY

SEQ ID NO: 393 - protein, 8 aa, HIV-1
QNFRVYYR

SEQ ID NO: 394 - protein, 8 aa, HIV-1
RVYYRDSR

SEQ ID NO: 395 - protein, 8 aa, HIV-1
YRDSRNPL

SEQ ID NO: 396 - protein, 8 aa, HIV-1
NPLWKGPA

SEQ ID NO: 397 - protein, 8 aa, HIV-1
KGPAKLLW

SEQ ID NO: 398 - protein, 8 aa, HIV-1
LLWKGEGA

SEQ ID NO: 399 - protein, 8 aa, HIV-1
VIQDNSDI

SEQ ID NO: 400 - protein, 8 aa, HIV-1
DIKVVPRR

SEQ ID NO: 401 - protein, 8 aa, HIV-1
VVPRRKAK

SEQ ID NO: 402 - protein, 8 aa, HIV-1
VPRRKAKI

SEQ ID NO: 403 - protein, 8 aa, HIV-1
RRKAKIIR

SEQ ID NO: 404 - protein, 8 aa, HIV-1
KIIRDYGK

SEQ ID NO: 405 - protein, 8 aa, HIV-1
KQMAGDDC

SEQ ID NO: 406 - protein, 8 aa, HIV-1
QMAGDDCV

SEQ ID NO: 407 - protein, 9 aa, HIV-1
VLSGGELDR

SEQ ID NO: 408 - protein, 9 aa, HIV-1
LSGGELDRW

SEQ ID NO: 409 - protein, 9 aa, HIV-1
DRWEKIRLR

SEQ ID NO: 410 - protein, 9 aa, HIV-1
KIRLRPGGK

SEQ ID NO: 411 - protein, 9 aa, HIV-1
RLRPGGKKK

SEQ ID NO: 412 - protein, 9 aa, HIV-1
GGKKKYKLK

SEQ ID NO: 413 - protein, 9 aa, HIV-1
KKYKLKHIV

SEQ ID NO: 414 - protein, 9 aa, HIV-1
KYKLKHIVW

SEQ ID NO: 415 - protein, 9 aa, HIV-1
KLKHIVWAS

SEQ ID NO: 416 - protein, 9 aa, HIV-1
HIVWASREL

SEQ ID NO: 417 - protein, 9 aa, HIV-1
WASRELERF

SEQ ID NO: 418 - protein, 9 aa, HIV-1
ERFAVNPGL

SEQ ID NO: 419 - protein, 9 aa, HIV-1
RFAVNPGLL

SEQ ID NO: 420 - protein, 9 aa, HIV-1
AVNPGLLET

SEQ ID NO: 421 - protein, 9 aa, HIV-1
GLLETSEGC

SEQ ID NO: 422 - protein, 9 aa, HIV-1
ETSEGCRQI

SEQ ID NO: 423 - protein, 9 aa, HIV-1
ILGQLQPSL

SEQ ID NO: 424 - protein, 9 aa, HIV-1
GQLQPSLQT

SEQ ID NO: 425 - protein, 9 aa, HIV-1
SLQTGSEEL

SEQ ID NO: 426 - protein, 9 aa, HIV-1
LQTGSEELR

SEQ ID NO: 427 - protein, 9 aa, HIV-1
GSEELRSLY

SEQ ID NO: 428 - protein, 9 aa, HIV-1
ELRSLYNTV

SEQ ID NO: 429 - protein, 9 aa, HIV-1
SLYNTVATL

SEQ ID NO: 430 - protein, 9 aa, HIV-1
LYNTVATLY

SEQ ID NO: 431 - protein, 9 aa, HIV-1
NTVATLYCV

SEQ ID NO: 432 - protein, 9 aa, HIV-1
ATLYCVHQR

SEQ ID NO: 433 - protein, 9 aa, HIV-1
TLYCVHQRI

SEQ ID NO: 434 - protein, 9 aa, HIV-1
YCVHQRIEI

SEQ ID NO: 435 - protein, 9 aa, HIV-1
CVHQRIEIK

SEQ ID NO: 436 - protein, 9 aa, HIV-1
QRIEIKDTK

SEQ ID NO: 437 - protein, 9 aa, HIV-1
EIKDTKEAL

SEQ ID NO: 438 - protein, 9 aa, HIV-1
ALDKIEEEQ

SEQ ID NO: 439 - protein, 9 aa, HIV-1
QQAAADTGH

SEQ ID NO: 440 - protein, 9 aa, HIV-1
HSNQVSQNY

SEQ ID NO: 441 - protein, 9 aa, HIV-1
NQVSQNYPI

SEQ ID NO: 442 - protein, 9 aa, HIV-1
QVSQNYPIV

SEQ ID NO: 443 - protein, 9 aa, HIV-1
QNYPIVQNI

SEQ ID NO: 444 - protein, 9 aa, HIV-1
VQNIQGQMV

SEQ ID NO: 445 - protein, 9 aa, HIV-1
IQGQMVHQA

SEQ ID NO: 446 - protein, 9 aa, HIV-1
MVHQAISPR

SEQ ID NO: 447 - protein, 9 aa, HIV-1
HQAISPRTL

SEQ ID NO: 448 - protein, 9 aa, HIV-1
AISPRTLNA

SEQ ID NO: 449 - protein, 9 aa, HIV-1
ISPRTLNAW

SEQ ID NO: 450 - protein, 9 aa, HIV-1
SPRTLNAWV

SEQ ID NO: 451 - protein, 9 aa, HIV-1
RTLNAWVKV

SEQ ID NO: 452 - protein, 9 aa, HIV-1
TLNAWVKVV

SEQ ID NO: 453 - protein, 9 aa, HIV-1
AWVKVVEEK

SEQ ID NO: 454 - protein, 9 aa, HIV-1
EEKAFSPEV

SEQ ID NO: 455 - protein, 9 aa, HIV-1
EKAFSPEVI

SEQ ID NO: 456 - protein, 9 aa, HIV-1
FSPEVIPMF

SEQ ID NO: 457 - protein, 9 aa, HIV-1
EVIPMFSAL

SEQ ID NO: 458 - protein, 9 aa, HIV-1
IPMFSALSE

SEQ ID NO: 459 - protein, 9 aa, HIV-1
ALSEGATPQ

SEQ ID NO: 460 - protein, 9 aa, HIV-1
SEGATPQDL

SEQ ID NO: 461 - protein, 9 aa, HIV-1
ATPQDLNTM

SEQ ID NO: 462 - protein, 9 aa, HIV-1
TPQDLNTML

SEQ ID NO: 463 - protein, 9 aa, HIV-1
DLNTMLNTV

SEQ ID NO: 464 - protein, 9 aa, HIV-1
NTVGGHQAA

SEQ ID NO: 465 - protein, 9 aa, HIV-1
TVGGHQAAM

SEQ ID NO: 466 - protein, 9 aa, HIV-1
HQAAMQMLK

SEQ ID NO: 467 - protein, 9 aa, HIV-1
AMQMLKETI

SEQ ID NO: 468 - protein, 9 aa, HIV-1
ETINEEAAE

SEQ ID NO: 469 - protein, 9 aa, HIV-1
TINEEAAEW

SEQ ID NO: 470 - protein, 9 aa, HIV-1
EEAAEWDRV

SEQ ID NO: 471 - protein, 9 aa, HIV-1
EAAEWDRVH

SEQ ID NO: 472 - protein, 9 aa, HIV-1
AEWDRVHPV

SEQ ID NO: 473 - protein, 9 aa, HIV-1
RVHPVHAGP

SEQ ID NO: 474 - protein, 9 aa, HIV-1
HPVHAGPIA

SEQ ID NO: 475 - protein, 9 aa, HIV-1
DIAGTTSTL

SEQ ID NO: 476 - protein, 9 aa, HIV-1
TTSTLQEQI

SEQ ID NO: 477 - protein, 9 aa, HIV-1
STLQEQIGW

SEQ ID NO: 478 - protein, 9 aa, HIV-1
TLQEQIGWM

SEQ ID NO: 479 - protein, 9 aa, HIV-1
GWMTNNPPI

SEQ ID NO: 480 - protein, 9 aa, HIV-1
MTNNPPIPV

SEQ ID NO: 481 - protein, 9 aa, HIV-1
NPPIPVGEI

SEQ ID NO: 482 - protein, 9 aa, HIV-1
PPIPVGEIY

SEQ ID NO: 483 - protein, 9 aa, HIV-1
IPVGEIYKR

SEQ ID NO: 484 - protein, 9 aa, HIV-1
GEIYKRWII

SEQ ID NO: 485 - protein, 9 aa, HIV-1
EIYKRWIIL

SEQ ID NO: 486 - protein, 9 aa, HIV-1
YKRWIILGL

SEQ ID NO: 487 - protein, 9 aa, HIV-1
RWIILGLNK

SEQ ID NO: 488 - protein, 9 aa, HIV-1
WIILGLNKI

SEQ ID NO: 489 - protein, 9 aa, HIV-1
IILGLNKIV

SEQ ID NO: 490 - protein, 9 aa, HIV-1
GLNKIVRMY

SEQ ID NO: 491 - protein, 9 aa, HIV-1
KIVRMYSPT

SEQ ID NO: 492 - protein, 9 aa, HIV-1
IVRMYSPTS

SEQ ID NO: 493 - protein, 9 aa, HIV-1
RMYSPTSIL

SEQ ID NO: 494 - protein, 9 aa, HIV-1
SPTSILDIR

SEQ ID NO: 495 - protein, 9 aa, HIV-1
SILDIRQGP

SEQ ID NO: 496 - protein, 9 aa, HIV-1
ILDIRQGPK

SEQ ID NO: 497 - protein, 9 aa, HIV-1
RQGPKEPFR

SEQ ID NO: 498 - protein, 9 aa, HIV-1
EPFRDYVDR

SEQ ID NO: 499 - protein, 9 aa, HIV-1
PFRDYVDRF

SEQ ID NO: 500 - protein, 9 aa, HIV-1
RDYVDRFYK

SEQ ID NO: 501 - protein, 9 aa, HIV-1
DYVDRFYKT

SEQ ID NO: 502 - protein, 9 aa, HIV-1
YVDRFYKTL

SEQ ID NO: 503 - protein, 9 aa, HIV-1
VDRFYKTLR

SEQ ID NO: 504 - protein, 9 aa, HIV-1
RAEQASQEV

SEQ ID NO: 505 - protein, 9 aa, HIV-1
QASQEVKNW

SEQ ID NO: 506 - protein, 9 aa, HIV-1
EVKNWMTET

SEQ ID NO: 507 - protein, 9 aa, HIV-1
NWMTETLLV

SEQ ID NO: 508 - protein, 9 aa, HIV-1
WMTETLLVQ

SEQ ID NO: 509 - protein, 9 aa, HIV-1
VQNANPDCK

SEQ ID NO: 510 - protein, 9 aa, HIV-1
TILKALGPA

SEQ ID NO: 511 - protein, 9 aa, HIV-1
ILKALGPAA

SEQ ID NO: 512 - protein, 9 aa, HIV-1
KALGPAATL

SEQ ID NO: 513 - protein, 9 aa, HIV-1
GPAATLEEM

SEQ ID NO: 514 - protein, 9 aa, HIV-1
ATLEEMMTA

SEQ ID NO: 515 - protein, 9 aa, HIV-1
TLEEMMTAC

SEQ ID NO: 516 - protein, 9 aa, HIV-1
EEMMTACQG

SEQ ID NO: 517 - protein, 9 aa, HIV-1
EMMTACQGV

SEQ ID NO: 518 - protein, 9 aa, HIV-1
GVGGPGHKA

SEQ ID NO: 519 - protein, 9 aa, HIV-1
GGPGHKARV

SEQ ID NO: 520 - protein, 9 aa, HIV-1
GPGHKARVL

SEQ ID NO: 521 - protein, 9 aa, HIV-1
KARVLAEAM

SEQ ID NO: 522 - protein, 9 aa, HIV-1
VLAEAMSQV

SEQ ID NO: 523 - protein, 9 aa, HIV-1
LAEAMSQVT

SEQ ID NO: 524 - protein, 9 aa, HIV-1
AEAMSQVTN

SEQ ID NO: 525 - protein, 9 aa, HIV-1
AMSQVTNSA

SEQ ID NO: 526 - protein, 9 aa, HIV-1
SQVTNSATI

SEQ ID NO: 527 - protein, 9 aa, HIV-1
QVTNSATIM

SEQ ID NO: 528 - protein, 9 aa, HIV-1
VTNSATIMM

SEQ ID NO: 529 - protein, 9 aa, HIV-1
NSATIMMQR

SEQ ID NO: 530 - protein, 9 aa, HIV-1
IMMQRGNFR

SEQ ID NO: 531 - protein, 9 aa, HIV-1
MMQRGNFRN

SEQ ID NO: 532 - protein, 9 aa, HIV-1
RGNFRNQRK

SEQ ID NO: 533 - protein, 9 aa, HIV-1
FRNQRKIVK

SEQ ID NO: 534 - protein, 9 aa, HIV-1
NQRKIVKCF

SEQ ID NO: 535 - protein, 9 aa, HIV-1
IVKCFNCGK

SEQ ID NO: 536 - protein, 9 aa, HIV-1
EGHTARNCR

SEQ ID NO: 537 - protein, 9 aa, HIV-1
TARNCRAPR

SEQ ID NO: 538 - protein, 9 aa, HIV-1
ARNCRAPRK

SEQ ID NO: 539 - protein, 9 aa, HIV-1
RNCRAPRKK

SEQ ID NO: 540 - protein, 9 aa, HIV-1
APRKKGCWK

SEQ ID NO: 541 - protein, 9 aa, HIV-1
HQMKDCTER

SEQ ID NO: 542 - protein, 9 aa, HIV-1
TERQANFLR

SEQ ID NO: 543 - protein, 9 aa, HIV-1
NFLREDLAF

SEQ ID NO: 544 - protein, 9 aa, HIV-1
FLREDLAFL

SEQ ID NO: 545 - protein, 9 aa, HIV-1
LAFLQGKAR

SEQ ID NO: 546 - protein, 9 aa, HIV-1
FLQGKAREF

SEQ ID NO: 547 - protein, 9 aa, HIV-1
KAREFSSEQ

SEQ ID NO: 548 - protein, 9 aa, HIV-1
REFSSEQTR

SEQ ID NO: 549 - protein, 9 aa, HIV-1
QTRANSPTR

SEQ ID NO: 550 - protein, 9 aa, HIV-1
SPTRRELQV

SEQ ID NO: 551 - protein, 9 aa, HIV-1
PTRRELQVW

SEQ ID NO: 552 - protein, 9 aa, HIV-1
RRELQVWGR

SEQ ID NO: 553 - protein, 9 aa, HIV-1
ADRQGTVSF

SEQ ID NO: 554 - protein, 9 aa, HIV-1
RQGTVSFNF

SEQ ID NO: 555 - protein, 9 aa, HIV-1
TVSFNFPQV

SEQ ID NO: 556 - protein, 9 aa, HIV-1
FNFPQVTLW

SEQ ID NO: 557 - protein, 9 aa, HIV-1
FPQVTLWQR

SEQ ID NO: 558 - protein, 9 aa, HIV-1
VTLWQRPLV

SEQ ID NO: 559 - protein, 9 aa, HIV-1
TLWQRPLVT

SEQ ID NO: 560 - protein, 9 aa, HIV-1
LWQRPLVTI

SEQ ID NO: 561 - protein, 9 aa, HIV-1
WQRPLVTIK

SEQ ID NO: 562 - protein, 9 aa, HIV-1
TIKIGGQLK

SEQ ID NO: 563 - protein, 9 aa, HIV-1
QLKEALLDT

SEQ ID NO: 564 - protein, 9 aa, HIV-1
DTVLEEMSL

SEQ ID NO: 565 - protein, 9 aa, HIV-1
EEMSLPGRW

SEQ ID NO: 566 - protein, 9 aa, HIV-1
EMSLPGRWK

SEQ ID NO: 567 - protein, 9 aa, HIV-1
SLPGRWKPK

SEQ ID NO: 568 - protein, 9 aa, HIV-1
LPGRWKPKM

SEQ ID NO: 569 - protein, 9 aa, HIV-1
KMIGGIGGF

SEQ ID NO: 570 - protein, 9 aa, HIV-1
MIGGIGGFI

SEQ ID NO: 571 - protein, 9 aa, HIV-1
GGIGGFIKV

SEQ ID NO: 572 - protein, 9 aa, HIV-1
KVRQYDQIL

SEQ ID NO: 573 - protein, 9 aa, HIV-1
RQYDQILIE

SEQ ID NO: 574 - protein, 9 aa, HIV-1
QYDQILIEI

SEQ ID NO: 575 - protein, 9 aa, HIV-1
ILIEICGHK

SEQ ID NO: 576 - protein, 9 aa, HIV-1
IEICGHKAI

SEQ ID NO: 577 - protein, 9 aa, HIV-1
HKAIGTVLV

SEQ ID NO: 578 - protein, 9 aa, HIV-1
TVLVGPTPV

SEQ ID NO: 579 - protein, 9 aa, HIV-1
LVGPTPVNI

SEQ ID NO: 580 - protein, 9 aa, HIV-1
LLTQIGCTL

SEQ ID NO: 581 - protein, 9 aa, HIV-1
TQIGCTLNF

SEQ ID NO: 582 - protein, 9 aa, HIV-1
TLNFPISPI

SEQ ID NO: 583 - protein, 9 aa, HIV-1
FPISPIETV

SEQ ID NO: 584 - protein, 9 aa, HIV-1
SPIETVPVK

SEQ ID NO: 585 - protein, 9 aa, HIV-1
VPVKLKPGM

SEQ ID NO: 586 - protein, 9 aa, HIV-1
GMDGPKVKQ

SEQ ID NO: 587 - protein, 9 aa, HIV-1
GPKVKQWPL

SEQ ID NO: 588 - protein, 9 aa, HIV-1
KQWPLTEEK

SEQ ID NO: 589 - protein, 9 aa, HIV-1
QWPLTEEKI

SEQ ID NO: 590 - protein, 9 aa, HIV-1
PLTEEKIKA

SEQ ID NO: 591 - protein, 9 aa, HIV-1
LTEEKIKAL

SEQ ID NO: 592 - protein, 9 aa, HIV-1
ALVEICTEM

SEQ ID NO: 593 - protein, 9 aa, HIV-1
CTEMEKEGK

SEQ ID NO: 594 - protein, 9 aa, HIV-1
PENPYNTPV

SEQ ID NO: 595 - protein, 9 aa, HIV-1
NPYNTPVFA

SEQ ID NO: 596 - protein, 9 aa, HIV-1
PYNTPVFAI

SEQ ID NO: 597 - protein, 9 aa, HIV-1
YNTPVFAIK

SEQ ID NO: 598 - protein, 9 aa, HIV-1
NTPVFAIKK

SEQ ID NO: 599 - protein, 9 aa, HIV-1
TPVFAIKKK

SEQ ID NO: 600 - protein, 9 aa, HIV-1
FAIKKKDST

SEQ ID NO: 601 - protein, 9 aa, HIV-1
AIKKKDSTK

SEQ ID NO: 602 - protein, 9 aa, HIV-1
KWRKLVDFR

SEQ ID NO: 603 - protein, 9 aa, HIV-1
KLVDFRELN

SEQ ID NO: 604 - protein, 9 aa, HIV-1
LVDFRELNK

SEQ ID NO: 605 - protein, 9 aa, HIV-1
ELNKRTQDF

SEQ ID NO: 606 - protein, 9 aa, HIV-1
KRTQDFWEV

SEQ ID NO: 607 - protein, 9 aa, HIV-1
RTQDFWEVQ

SEQ ID NO: 608 - protein, 9 aa, HIV-1
TQDFWEVQL

SEQ ID NO: 609 - protein, 9 aa, HIV-1
DFWEVQLGI

SEQ ID NO: 610 - protein, 9 aa, HIV-1
WEVQLGIPH

SEQ ID NO: 611 - protein, 9 aa, HIV-1
VQLGIPHPA

SEQ ID NO: 612 - protein, 9 aa, HIV-1
LGIPHPAGL

SEQ ID NO: 613 - protein, 9 aa, HIV-1
GIPHPAGLK

SEQ ID NO: 614 - protein, 9 aa, HIV-1
IPHPAGLKK

SEQ ID NO: 615 - protein, 9 aa, HIV-1
TVLDVGDAY

SEQ ID NO: 616 - protein, 9 aa, HIV-1
VLDVGDAYF

SEQ ID NO: 617 - protein, 9 aa, HIV-1
DVGDAYFSV

SEQ ID NO: 618 - protein, 9 aa, HIV-1
FSVPLDEDF

SEQ ID NO: 619 - protein, 9 aa, HIV-1
SVPLDEDFR

SEQ ID NO: 620 - protein, 9 aa, HIV-1
EDFRKYTAF

SEQ ID NO: 621 - protein, 9 aa, HIV-1
DFRKYTAFT

SEQ ID NO: 622 - protein, 9 aa, HIV-1
YTAFTIPSI

SEQ ID NO: 623 - protein, 9 aa, HIV-1
FTIPSINNE

SEQ ID NO: 624 - protein, 9 aa, HIV-1
TIPSINNET

SEQ ID NO: 625 - protein, 9 aa, HIV-1
SINNETPGI

SEQ ID NO: 626 - protein, 9 aa, HIV-1
ETPGIRYQY

SEQ ID NO: 627 - protein, 9 aa, HIV-1
YQYNVLPQG

SEQ ID NO: 628 - protein, 9 aa, HIV-1
QYNVLPQGW

SEQ ID NO: 629 - protein, 9 aa, HIV-1
VLPQGWKGS

SEQ ID NO: 630 - protein, 9 aa, HIV-1
QGWKGSPAI

SEQ ID NO: 631 - protein, 9 aa, HIV-1
GWKGSPAIF

SEQ ID NO: 632 - protein, 9 aa, HIV-1
SPAIFQSSM

SEQ ID NO: 633 - protein, 9 aa, HIV-1
AIFQSSMTK

SEQ ID NO: 634 - protein, 9 aa, HIV-1
IFQSSMTKI

SEQ ID NO: 635 - protein, 9 aa, HIV-1
FQSSMTKIL

SEQ ID NO: 636 - protein, 9 aa, HIV-1
SMTKILEPF

SEQ ID NO: 637 - protein, 9 aa, HIV-1
MTKILEPFR

SEQ ID NO: 638 - protein, 9 aa, HIV-1
KQNPDIVIY

SEQ ID NO: 639 - protein, 9 aa, HIV-1
NPDIVIYQY

SEQ ID NO: 640 - protein, 9 aa, HIV-1
VIYQYMDDL

SEQ ID NO: 641 - protein, 9 aa, HIV-1
IYQYMDDLY

SEQ ID NO: 642 - protein, 9 aa, HIV-1
YQYMDDLYV

SEQ ID NO: 643 - protein, 9 aa, HIV-1
YMDDLYVGS

SEQ ID NO: 644 - protein, 9 aa, HIV-1
LYVGSDLEI

SEQ ID NO: 645 - protein, 9 aa, HIV-1
DLEIGQHRT

SEQ ID NO: 646 - protein, 9 aa, HIV-1
HRTKIEELR

SEQ ID NO: 647 - protein, 9 aa, HIV-1
KIEELRQHL

SEQ ID NO: 648 - protein, 9 aa, HIV-1
IEELRQHLL

SEQ ID NO: 649 - protein, 9 aa, HIV-1
ELRQHLLRW

SEQ ID NO: 650 - protein, 9 aa, HIV-1
RQHLLRWGL

SEQ ID NO: 651 - protein, 9 aa, HIV-1
HLLRWGLTT

SEQ ID NO: 652 - protein, 9 aa, HIV-1
LLRWGLTTP

SEQ ID NO: 653 - protein, 9 aa, HIV-1
RWGLTTPDK

SEQ ID NO: 654 - protein, 9 aa, HIV-1
TTPDKKHQK

SEQ ID NO: 655 - protein, 9 aa, HIV-1
EPPFLWMGY

SEQ ID NO: 656 - protein, 9 aa, HIV-1
PFLWMGYEL

SEQ ID NO: 657 - protein, 9 aa, HIV-1
FLWMGYELH

SEQ ID NO: 658 - protein, 9 aa, HIV-1
MGYELHPDK

SEQ ID NO: 659 - protein, 9 aa, HIV-1
GYELHPDKW

SEQ ID NO: 660 - protein, 9 aa, HIV-1
YELHPDKWT

SEQ ID NO: 661 - protein, 9 aa, HIV-1
ELHPDKWTV

SEQ ID NO: 662 - protein, 9 aa, HIV-1
KWTVQPIVL

SEQ ID NO: 663 - protein, 9 aa, HIV-1
VQPIVLPEK

SEQ ID NO: 664 - protein, 9 aa, HIV-1
IVLPEKDSW

SEQ ID NO: 665 - protein, 9 aa, HIV-1
VLPEKDSWT

SEQ ID NO: 666 - protein, 9 aa, HIV-1
LPEKDSWTV

SEQ ID NO: 667 - protein, 9 aa, HIV-1
SWTVNDIQK

SEQ ID NO: 668 - protein, 9 aa, HIV-1
WTVNDIQKL

SEQ ID NO: 669 - protein, 9 aa, HIV-1
TVNDIQKLV

SEQ ID NO: 670 - protein, 9 aa, HIV-1
KLVGKLNWA

SEQ ID NO: 671 - protein, 9 aa, HIV-1
KLNWASQIY

SEQ ID NO: 672 - protein, 9 aa, HIV-1
WASQIYPGI

SEQ ID NO: 673 - protein, 9 aa, HIV-1
ASQIYPGIK

SEQ ID NO: 674 - protein, 9 aa, HIV-1
SQIYPGIKV

SEQ ID NO: 675 - protein, 9 aa, HIV-1
QIYPGIKVR

SEQ ID NO: 676 - protein, 9 aa, HIV-1
YPGIKVRQL

SEQ ID NO: 677 - protein, 9 aa, HIV-1
GIKVRQLCK

SEQ ID NO: 678 - protein, 9 aa, HIV-1
LCKLLRGTK

SEQ ID NO: 679 - protein, 9 aa, HIV-1
KLLRGTKAL

SEQ ID NO: 680 - protein, 9 aa, HIV-1
LLRGTKALT

SEQ ID NO: 681 - protein, 9 aa, HIV-1
KALTEVIPL

SEQ ID NO: 682 - protein, 9 aa, HIV-1
ALTEVIPLT

SEQ ID NO: 683 - protein, 9 aa, HIV-1
EVIPLTEEA

SEQ ID NO: 684 - protein, 9 aa, HIV-1
IPLTEEAEL

SEQ ID NO: 685 - protein, 9 aa, HIV-1
EEAELELAE

SEQ ID NO: 686 - protein, 9 aa, HIV-1
ELAENREIL

SEQ ID NO: 687 - protein, 9 aa, HIV-1
LAENREILK

SEQ ID NO: 688 - protein, 9 aa, HIV-1
ILKEPVHGV

SEQ ID NO: 689 - protein, 9 aa, HIV-1
KEPVHGVYY

SEQ ID NO: 690 - protein, 9 aa, HIV-1
HGVYYDPSK

SEQ ID NO: 691 - protein, 9 aa, HIV-1
VYYDPSKDL

SEQ ID NO: 692 - protein, 9 aa, HIV-1
YYDPSKDLI

SEQ ID NO: 693 - protein, 9 aa, HIV-1
IQKQGQGQW

SEQ ID NO: 694 - protein, 9 aa, HIV-1
KQGQGQWTY

SEQ ID NO: 695 - protein, 9 aa, HIV-1
GQGQWTYQI

SEQ ID NO: 696 - protein, 9 aa, HIV-1
TYQIYQEPF

SEQ ID NO: 697 - protein, 9 aa, HIV-1
YQIYQEPFK

SEQ ID NO: 698 - protein, 9 aa, HIV-1
IYQEPFKNL

SEQ ID NO: 699 - protein, 9 aa, HIV-1
NLKTGKYAR

SEQ ID NO: 700 - protein, 9 aa, HIV-1
KTGKYARMR

SEQ ID NO: 701 - protein, 9 aa, HIV-1
KYARMRGAH

SEQ ID NO: 702 - protein, 9 aa, HIV-1
YARMRGAHT

SEQ ID NO: 703 - protein, 9 aa, HIV-1
DVKQLTEAV

SEQ ID NO: 704 - protein, 9 aa, HIV-1
KQLTEAVQK

SEQ ID NO: 705 - protein, 9 aa, HIV-1
QLTEAVQKI

SEQ ID NO: 706 - protein, 9 aa, HIV-1
VQKITTESI

SEQ ID NO: 707 - protein, 9 aa, HIV-1
KITTESIVI

SEQ ID NO: 708 - protein, 9 aa, HIV-1
ITTESIVIW

SEQ ID NO: 709 - protein, 9 aa, HIV-1
ESIVIWGKT

SEQ ID NO: 710 - protein, 9 aa, HIV-1
IVIWGKTPK

SEQ ID NO: 711 - protein, 9 aa, HIV-1
IWGKTPKFK

SEQ ID NO: 712 - protein, 9 aa, HIV-1
KTPKFKLPI

SEQ ID NO: 713 - protein, 9 aa, HIV-1
IQKETWETW

SEQ ID NO: 714 - protein, 9 aa, HIV-1
ETWETWWTE

SEQ ID NO: 715 - protein, 9 aa, HIV-1
TWETWWTEY

SEQ ID NO: 716 - protein, 9 aa, HIV-1
WETWWTEYW

SEQ ID NO: 717 - protein, 9 aa, HIV-1
ETWWTEYWQ

SEQ ID NO: 718 - protein, 9 aa, HIV-1
WTEYWQATW

SEQ ID NO: 719 - protein, 9 aa, HIV-1
TEYWQATWI

SEQ ID NO: 720 - protein, 9 aa, HIV-1
WQATWIPEW

SEQ ID NO: 721 - protein, 9 aa, HIV-1
ATWIPEWEF

SEQ ID NO: 722 - protein, 9 aa, HIV-1
IPEWEFVNT

SEQ ID NO: 723 - protein, 9 aa, HIV-1
WEFVNTPPL

SEQ ID NO: 724 - protein, 9 aa, HIV-1
EFVNTPPLV

SEQ ID NO: 725 - protein, 9 aa, HIV-1
FVNTPPLVK

SEQ ID NO: 726 - protein, 9 aa, HIV-1
NTPPLVKLW

SEQ ID NO: 727 - protein, 9 aa, HIV-1
TPPLVKLWY

SEQ ID NO: 728 - protein, 9 aa, HIV-1
PLVKLWYQL

SEQ ID NO: 729 - protein, 9 aa, HIV-1
WYQLEKEPI

SEQ ID NO: 730 - protein, 9 aa, HIV-1
YQLEKEPIV

SEQ ID NO: 731 - protein, 9 aa, HIV-1
EPIVGAETF

SEQ ID NO: 732 - protein, 9 aa, HIV-1
PIVGAETFY

SEQ ID NO: 733 - protein, 9 aa, HIV-1
IVGAETFYV

SEQ ID NO: 734 - protein, 9 aa, HIV-1
AETFYVDGA

SEQ ID NO: 735 - protein, 9 aa, HIV-1
ETFYVDGAA

SEQ ID NO: 736 - protein, 9 aa, HIV-1
FYVDGAANR

SEQ ID NO: 737 - protein, 9 aa, HIV-1
ANRETKLGK

SEQ ID NO: 738 - protein, 9 aa, HIV-1
ETKLGKAGY

SEQ ID NO: 739 - protein, 9 aa, HIV-1
KLGKAGYVT

SEQ ID NO: 740 - protein, 9 aa, HIV-1
YVTNRGRQK

SEQ ID NO: 741 - protein, 9 aa, HIV-1
VTNRGRQKV

SEQ ID NO: 742 - protein, 9 aa, HIV-1
RGRQKVVTL

SEQ ID NO: 743 - protein, 9 aa, HIV-1
TLTDTTNQK

SEQ ID NO: 744 - protein, 9 aa, HIV-1
DTTNQKTEL

SEQ ID NO: 745 - protein, 9 aa, HIV-1
TTNQKTELQ

SEQ ID NO: 746 - protein, 9 aa, HIV-1
NQKTELQAI

SEQ ID NO: 747 - protein, 9 aa, HIV-1
ELQAIYLAL

SEQ ID NO: 748 - protein, 9 aa, HIV-1
LQAIYLALQ

SEQ ID NO: 749 - protein, 9 aa, HIV-1
YLALQDSGL

SEQ ID NO: 750 - protein, 9 aa, HIV-1
ALQDSGLEV

SEQ ID NO: 751 - protein, 9 aa, HIV-1
EVNIVTDSQ

SEQ ID NO: 752 - protein, 9 aa, HIV-1
IVTDSQYAL

SEQ ID NO: 753 - protein, 9 aa, HIV-1
YALGIIQAQ

SEQ ID NO: 754 - protein, 9 aa, HIV-1
AQPDQSESE

SEQ ID NO: 755 - protein, 9 aa, HIV-1
QPDQSESEL

SEQ ID NO: 756 - protein, 9 aa, HIV-1
SESELVNQI

SEQ ID NO: 757 - protein, 9 aa, HIV-1
ELVNQIIEQ

SEQ ID NO: 758 - protein, 9 aa, HIV-1
LVNQIIEQL

SEQ ID NO: 759 - protein, 9 aa, HIV-1
QIIEQLIKK

SEQ ID NO: 760 - protein, 9 aa, HIV-1
QLIKKEKVY

SEQ ID NO: 761 - protein, 9 aa, HIV-1
LIKKEKVYL

SEQ ID NO: 762 - protein, 9 aa, HIV-1
KEKVYLAWV

SEQ ID NO: 763 - protein, 9 aa, HIV-1
KVYLAWVPA

SEQ ID NO: 764 - protein, 9 aa, HIV-1
YLAWVPAHK

SEQ ID NO: 765 - protein, 9 aa, HIV-1
KGIGGNEQV

SEQ ID NO: 766 - protein, 9 aa, HIV-1
EQVDKLVSA

SEQ ID NO: 767 - protein, 9 aa, HIV-1
KLVSAGIRK

SEQ ID NO: 768 - protein, 9 aa, HIV-1
LVSAGIRKV

SEQ ID NO: 769 - protein, 9 aa, HIV-1
VLFLDGIDK

SEQ ID NO: 770 - protein, 9 aa, HIV-1
FLDGIDKAQ

SEQ ID NO: 771 - protein, 9 aa, HIV-1
KYHSNWRAM

SEQ ID NO: 772 - protein, 9 aa, HIV-1
NWRAMASDF

SEQ ID NO: 773 - protein, 9 aa, HIV-1
RAMASDFNL

SEQ ID NO: 774 - protein, 9 aa, HIV-1
ASDFNLPPV

SEQ ID NO: 775 - protein, 9 aa, HIV-1
LPPVVAKEI

SEQ ID NO: 776 - protein, 9 aa, HIV-1
PPVVAKEIV

SEQ ID NO: 777 - protein, 9 aa, HIV-1
ASCDKCQLK

SEQ ID NO: 778 - protein, 9 aa, HIV-1
GQVDCSPGI

SEQ ID NO: 779 - protein, 9 aa, HIV-1
DCSPGIWQL

SEQ ID NO: 780 - protein, 9 aa, HIV-1
IWQLDCTHL

SEQ ID NO: 781 - protein, 9 aa, HIV-1
WQLDCTHLE

SEQ ID NO: 782 - protein, 9 aa, HIV-1
THLEGKVIL

SEQ ID NO: 783 - protein, 9 aa, HIV-1
HLEGKVILV

SEQ ID NO: 784 - protein, 9 aa, HIV-1
EGKVILVAV

SEQ ID NO: 785 - protein, 9 aa, HIV-1
KVILVAVHV

SEQ ID NO: 786 - protein, 9 aa, HIV-1
VILVAVHVA

SEQ ID NO: 787 - protein, 9 aa, HIV-1
VAVHVASGY

SEQ ID NO: 788 - protein, 9 aa, HIV-1
AVHVASGYI

SEQ ID NO: 789 - protein, 9 aa, HIV-1
HVASGYIEA

SEQ ID NO: 790 - protein, 9 aa, HIV-1
YIEAEVIPA

SEQ ID NO: 791 - protein, 9 aa, HIV-1
AEVIPAETG

SEQ ID NO: 792 - protein, 9 aa, HIV-1
IPAETGQET

SEQ ID NO: 793 - protein, 9 aa, HIV-1
AETGQETAY

SEQ ID NO: 794 - protein, 9 aa, HIV-1
ETGQETAYF

SEQ ID NO: 795 - protein, 9 aa, HIV-1
GQETAYFLL

SEQ ID NO: 796 - protein, 9 aa, HIV-1
QETAYFLLK

SEQ ID NO: 797 - protein, 9 aa, HIV-1
ETAYFLLKL

SEQ ID NO: 798 - protein, 9 aa, HIV-1
YFLLKLAGR

SEQ ID NO: 799 - protein, 9 aa, HIV-1
LKLAGRWPV

SEQ ID NO: 800 - protein, 9 aa, HIV-1
KLAGRWPVK

SEQ ID NO: 801 - protein, 9 aa, HIV-1
GRWPVKTIH

SEQ ID NO: 802 - protein, 9 aa, HIV-1
WPVKTIHTD

SEQ ID NO: 803 - protein, 9 aa, HIV-1
HTDNGSNFT

SEQ ID NO: 804 - protein, 9 aa, HIV-1
SNFTGATVR

SEQ ID NO: 805 - protein, 9 aa, HIV-1
FTGATVRAA

SEQ ID NO: 806 - protein, 9 aa, HIV-1
GATVRAACW

SEQ ID NO: 807 - protein, 9 aa, HIV-1
ATVRAACWW

SEQ ID NO: 808 - protein, 9 aa, HIV-1
RAACWWAGI

SEQ ID NO: 809 - protein, 9 aa, HIV-1
AACWWAGIK

SEQ ID NO: 810 - protein, 9 aa, HIV-1
WWAGIKQEF

SEQ ID NO: 811 - protein, 9 aa, HIV-1
IKQEFGIPY

SEQ ID NO: 812 - protein, 9 aa, HIV-1
ESMNKELKK

SEQ ID NO: 813 - protein, 9 aa, HIV-1
SMNKELKKI

SEQ ID NO: 814 - protein, 9 aa, HIV-1
ELKKIIGQV

SEQ ID NO: 815 - protein, 9 aa, HIV-1
IIGQVRDQA

SEQ ID NO: 816 - protein, 9 aa, HIV-1
HLKTAVQMA

SEQ ID NO: 817 - protein, 9 aa, HIV-1
LKTAVQMAV

SEQ ID NO: 818 - protein, 9 aa, HIV-1
KTAVQMAVF

SEQ ID NO: 819 - protein, 9 aa, HIV-1
TAVQMAVFI

SEQ ID NO: 820 - protein, 9 aa, HIV-1
AVQMAVFIH

SEQ ID NO: 821 - protein, 9 aa, HIV-1
VQMAVFIHN

SEQ ID NO: 822 - protein, 9 aa, HIV-1
QMAVFIHNF

SEQ ID NO: 823 - protein, 9 aa, HIV-1
MAVFIHNFK

SEQ ID NO: 824 - protein, 9 aa, HIV-1
AVFIHNFKR

SEQ ID NO: 825 - protein, 9 aa, HIV-1
VFIHNFKRK

SEQ ID NO: 826 - protein, 9 aa, HIV-1
KRKGGIGGY

SEQ ID NO: 827 - protein, 9 aa, HIV-1
IIATDIQTK

SEQ ID NO: 828 - protein, 9 aa, HIV-1
ELQKQITKI

SEQ ID NO: 829 - protein, 9 aa, HIV-1
KQITKIQNF

SEQ ID NO: 830 - protein, 9 aa, HIV-1
QITKIQNFR

SEQ ID NO: 831 - protein, 9 aa, HIV-1
ITKIQNFRV

SEQ ID NO: 832 - protein, 9 aa, HIV-1
KIQNFRVYY

SEQ ID NO: 833 - protein, 9 aa, HIV-1
IQNFRVYYR

SEQ ID NO: 834 - protein, 9 aa, HIV-1
FRVYYRDSR

SEQ ID NO: 835 - protein, 9 aa, HIV-1
YYRDSRNPL

SEQ ID NO: 836 - protein, 9 aa, HIV-1
PLWKGPAKL

SEQ ID NO: 837 - protein, 9 aa, HIV-1
KLLWKGEGA

SEQ ID NO: 838 - protein, 9 aa, HIV-1
LLWKGEGAV

SEQ ID NO: 839 - protein, 9 aa, HIV-1
VIQDNSDIK

SEQ ID NO: 840 - protein, 9 aa, HIV-1
IQDNSDIKV

SEQ ID NO: 841 - protein, 9 aa, HIV-1
NSDIKVVPR

SEQ ID NO: 842 - protein, 9 aa, HIV-1
KVVPRRKAK

SEQ ID NO: 843 - protein, 9 aa, HIV-1
VPRRKAKII

SEQ ID NO: 844 - protein, 9 aa, HIV-1
KQMAGDDCV

SEQ ID NO: 845 - protein, 9 aa, HIV-1
QMAGDDCVA

SEQ ID NO: 846 - protein, 10 aa, HIV-1
RASVLSGGEL

SEQ ID NO: 847 - protein, 10 aa, HIV-1
SVLSGGELDR

SEQ ID NO: 848 - protein, 10 aa, HIV-1
VLSGGELDRW

SEQ ID NO: 849 - protein, 10 aa, HIV-1
ELDRWEKIRL

SEQ ID NO: 850 - protein, 10 aa, HIV-1
KIRLRPGGKK

SEQ ID NO: 851 - protein, 10 aa, HIV-1
RLRPGGKKKY

SEQ ID NO: 852 - protein, 10 aa, HIV-1
RPGGKKKYKL

SEQ ID NO: 853 - protein, 10 aa, HIV-1
KKYKLKHIVW

SEQ ID NO: 854 - protein, 10 aa, HIV-1
KLKHIVWASR

SEQ ID NO: 855 - protein, 10 aa, HIV-1
IVWASRELER

SEQ ID NO: 856 - protein, 10 aa, HIV-1
VWASRELERF

SEQ ID NO: 857 - protein, 10 aa, HIV-1
LERFAVNPGL

SEQ ID NO: 858 - protein, 10 aa, HIV-1
ERFAVNPGLL

SEQ ID NO: 859 - protein, 10 aa, HIV-1
FAVNPGLLET

SEQ ID NO: 860 - protein, 10 aa, HIV-1
ETSEGCRQIL

SEQ ID NO: 861 - protein, 10 aa, HIV-1
RQILGQLQPS

SEQ ID NO: 862 - protein, 10 aa, HIV-1
QILGQLQPSL

SEQ ID NO: 863 - protein, 10 aa, HIV-1
ILGQLQPSLQ

SEQ ID NO: 864 - protein, 10 aa, HIV-1
SLQTGSEELR

SEQ ID NO: 865 - protein, 10 aa, HIV-1
EELRSLYNTV

SEQ ID NO: 866 - protein, 10 aa, HIV-1
RSLYNTVATL

SEQ ID NO: 867 - protein, 10 aa, HIV-1
SLYNTVATLY

SEQ ID NO: 868 - protein, 10 aa, HIV-1
VATLYCVHQR

SEQ ID NO: 869 - protein, 10 aa, HIV-1
ATLYCVHQRI

SEQ ID NO: 870 - protein, 10 aa, HIV-1
LYCVHQRIEI

SEQ ID NO: 871 - protein, 10 aa, HIV-1
IEIKDTKEAL

SEQ ID NO: 872 - protein, 10 aa, HIV-1
AADTGHSNQV

SEQ ID NO: 873 - protein, 10 aa, HIV-1
NQVSQNYPIV

SEQ ID NO: 874 - protein, 10 aa, HIV-1
SQNYPIVQNI

SEQ ID NO: 875 - protein, 10 aa, HIV-1
PIVQNIQGQM

SEQ ID NO: 876 - protein, 10 aa, HIV-1
IVQNIQGQMV

SEQ ID NO: 877 - protein, 10 aa, HIV-1
VQNIQGQMVH

SEQ ID NO: 878 - protein, 10 aa, HIV-1
NIQGQMVHQA

SEQ ID NO: 879 - protein, 10 aa, HIV-1
IQGQMVHQAI

SEQ ID NO: 880 - protein, 10 aa, HIV-1
QMVHQAISPR

SEQ ID NO: 881 - protein, 10 aa, HIV-1
AISPRTLNAW

SEQ ID NO: 882 - protein, 10 aa, HIV-1
RTLNAWVKVV

SEQ ID NO: 883 - protein, 10 aa, HIV-1
NAWVKVVEEK

SEQ ID NO: 884 - protein, 10 aa, HIV-1
WVKVVEEKAF

SEQ ID NO: 885 - protein, 10 aa, HIV-1
VEEKAFSPEV

SEQ ID NO: 886 - protein, 10 aa, HIV-1
EEKAFSPEVI

SEQ ID NO: 887 - protein, 10 aa, HIV-1
KAFSPEVIPM

SEQ ID NO: 888 - protein, 10 aa, HIV-1
AFSPEVIPMF

SEQ ID NO: 889 - protein, 10 aa, HIV-1
PEVIPMFSAL

SEQ ID NO: 890 - protein, 10 aa, HIV-1
EVIPMFSALS

SEQ ID NO: 891 - protein, 10 aa, HIV-1
PMFSALSEGA

SEQ ID NO: 892 - protein, 10 aa, HIV-1
ATPQDLNTML

SEQ ID NO: 893 - protein, 10 aa, HIV-1
MLNTVGGHQA

SEQ ID NO: 894 - protein, 10 aa, HIV-1
NTVGGHQAAM

SEQ ID NO: 895 - protein, 10 aa, HIV-1
GHQAAMQMLK

SEQ ID NO: 896 - protein, 10 aa, HIV-1
AAMQMLKETI

SEQ ID NO: 897 - protein, 10 aa, HIV-1
MLKETINEEA

SEQ ID NO: 898 - protein, 10 aa, HIV-1
ETINEEAAEW

SEQ ID NO: 899 - protein, 10 aa, HIV-1
AAEWDRVHPV

SEQ ID NO: 900 - protein, 10 aa, HIV-1
RVHPVHAGPI

SEQ ID NO: 901 - protein, 10 aa, HIV-1
HPVHAGPIAP

SEQ ID NO: 902 - protein, 10 aa, HIV-1
IAPGQMREPR

SEQ ID NO: 903 - protein, 10 aa, HIV-1
TSTLQEQIGW

SEQ ID NO: 904 - protein, 10 aa, HIV-1
STLQEQIGWM

SEQ ID NO: 905 - protein, 10 aa, HIV-1
TLQEQIGWMT

SEQ ID NO: 906 - protein, 10 aa, HIV-1
WMTNNPPIPV

SEQ ID NO: 907 - protein, 10 aa, HIV-1
NPPIPVGEIY

SEQ ID NO: 908 - protein, 10 aa, HIV-1
IPVGEIYKRW

SEQ ID NO: 909 - protein, 10 aa, HIV-1
GEIYKRWIIL

SEQ ID NO: 910 - protein, 10 aa, HIV-1
IYKRWIILGL

SEQ ID NO: 911 - protein, 10 aa, HIV-1
KRWIILGLNK

SEQ ID NO: 912 - protein, 10 aa, HIV-1
RWIILGLNKI

SEQ ID NO: 913 - protein, 10 aa, HIV-1
WIILGLNKIV

SEQ ID NO: 914 - protein, 10 aa, HIV-1
IILGLNKIVR

SEQ ID NO: 915 - protein, 10 aa, HIV-1
ILGLNKIVRM

SEQ ID NO: 916 - protein, 10 aa, HIV-1
IVRMYSPTSI

SEQ ID NO: 917 - protein, 10 aa, HIV-1
MYSPTSILDI

SEQ ID NO: 918 - protein, 10 aa, HIV-1
YSPTSILDIR

SEQ ID NO: 919 - protein, 10 aa, HIV-1
SILDIRQGPK

SEQ ID NO: 920 - protein, 10 aa, HIV-1
DIRQGPKEPF

SEQ ID NO: 921 - protein, 10 aa, HIV-1
EPFRDYVDRF

SEQ ID NO: 922 - protein, 10 aa, HIV-1
DYVDRFYKTL

SEQ ID NO: 923 - protein, 10 aa, HIV-1
YVDRFYKTLR

SEQ ID NO: 924 - protein, 10 aa, HIV-1
RFYKTLRAEQ

SEQ ID NO: 925 - protein, 10 aa, HIV-1
RAEQASQEVK

SEQ ID NO: 926 - protein, 10 aa, HIV-1
EVKNWMTETL

SEQ ID NO: 927 - protein, 10 aa, HIV-1
WMTETLLVQN

SEQ ID NO: 928 - protein, 10 aa, HIV-1
LVQNANPDCK

SEQ ID NO: 929 - protein, 10 aa, HIV-1
KTILKALGPA

SEQ ID NO: 930 - protein, 10 aa, HIV-1
TILKALGPAA

SEQ ID NO: 931 - protein, 10 aa, HIV-1
ILKALGPAAT

SEQ ID NO: 932 - protein, 10 aa, HIV-1
GPAATLEEMM

SEQ ID NO: 933 - protein, 10 aa, HIV-1
ATLEEMMTAC

SEQ ID NO: 934 - protein, 10 aa, HIV-1
TLEEMMTACQ

SEQ ID NO: 935 - protein, 10 aa, HIV-1
EEMMTACQGV

SEQ ID NO: 936 - protein, 10 aa, HIV-1
VGGPGHKARV

SEQ ID NO: 937 - protein, 10 aa, HIV-1
RVLAEAMSQV

SEQ ID NO: 938 - protein, 10 aa, HIV-1
VLAEAMSQVT

SEQ ID NO: 939 - protein, 10 aa, HIV-1
AEAMSQVTNS

SEQ ID NO: 940 - protein, 10 aa, HIV-1
EAMSQVTNSA

SEQ ID NO: 941 - protein, 10 aa, HIV-1
AMSQVTNSAT

SEQ ID NO: 942 - protein, 10 aa, HIV-1
SQVTNSATIM

SEQ ID NO: 943 - protein, 10 aa, HIV-1
QVTNSATIMM

SEQ ID NO: 944 - protein, 10 aa, HIV-1
TNSATIMMQR

SEQ ID NO: 945 - protein, 10 aa, HIV-1
ATIMMQRGNF

SEQ ID NO: 946 - protein, 10 aa, HIV-1
TIMMQRGNFR

SEQ ID NO: 947 - protein, 10 aa, HIV-1
MMQRGNFRNQ

SEQ ID NO: 948 - protein, 10 aa, HIV-1
MQRGNFRNQR

SEQ ID NO: 949 - protein, 10 aa, HIV-1
NFRNQRKIVK

SEQ ID NO: 950 - protein, 10 aa, HIV-1
KIVKCFNCGK

SEQ ID NO: 951 - protein, 10 aa, HIV-1
KEGHTARNCR

SEQ ID NO: 952 - protein, 10 aa, HIV-1
HTARNCRAPR

SEQ ID NO: 953 - protein, 10 aa, HIV-1
TARNCRAPRK

SEQ ID NO: 954 - protein, 10 aa, HIV-1
ARNCRAPRKK

SEQ ID NO: 955 - protein, 10 aa, HIV-1
RAPRKKGCWK

SEQ ID NO: 956 - protein, 10 aa, HIV-1
APRKKGCWKC

SEQ ID NO: 957 - protein, 10 aa, HIV-1
RKKGCWKCGK

SEQ ID NO: 958 - protein, 10 aa, HIV-1
KCGKEGHQMK

SEQ ID NO: 959 - protein, 10 aa, HIV-1
QMKDCTERQA

SEQ ID NO: 960 - protein, 10 aa, HIV-1
CTERQANFLR

SEQ ID NO: 961 - protein, 10 aa, HIV-1
RQANFLREDL

SEQ ID NO: 962 - protein, 10 aa, HIV-1
NFLREDLAFL

SEQ ID NO: 963 - protein, 10 aa, HIV-1
FLREDLAFLQ

SEQ ID NO: 964 - protein, 10 aa, HIV-1
DLAFLQGKAR

SEQ ID NO: 965 - protein, 10 aa, HIV-1
AFLQGKAREF

SEQ ID NO: 966 - protein, 10 aa, HIV-1
REFSSEQTRA

SEQ ID NO: 967 - protein, 10 aa, HIV-1
EQTRANSPTR

SEQ ID NO: 968 - protein, 10 aa, HIV-1
QTRANSPTRR

SEQ ID NO: 969 - protein, 10 aa, HIV-1
RANSPTRREL

SEQ ID NO: 970 - protein, 10 aa, HIV-1
SPTRRELQVW

SEQ ID NO: 971 - protein, 10 aa, HIV-1
NSPSEAGADR

SEQ ID NO: 972 - protein, 10 aa, HIV-1
EAGADRQGTV

SEQ ID NO: 973 - protein, 10 aa, HIV-1
GTVSFNFPQV

SEQ ID NO: 974 - protein, 10 aa, HIV-1
VSFNFPQVTL

SEQ ID NO: 975 - protein, 10 aa, HIV-1
NFPQVTLWQR

SEQ ID NO: 976 - protein, 10 aa, HIV-1
QVTLWQRPLV

SEQ ID NO: 977 - protein, 10 aa, HIV-1
TLWQRPLVTI

SEQ ID NO: 978 - protein, 10 aa, HIV-1
WQRPLVTIKI

SEQ ID NO: 979 - protein, 10 aa, HIV-1
VTIKIGGQLK

SEQ ID NO: 980 - protein, 10 aa, HIV-1
KIGGQLKEAL

SEQ ID NO: 981 - protein, 10 aa, HIV-1
ALLDTGADDT

SEQ ID NO: 982 - protein, 10 aa, HIV-1
LLDTGADDTV

SEQ ID NO: 983 - protein, 10 aa, HIV-1
GADDTVLEEM

SEQ ID NO: 984 - protein, 10 aa, HIV-1
MSLPGRWKPK

SEQ ID NO: 985 - protein, 10 aa, HIV-1
SLPGRWKPKM

SEQ ID NO: 986 - protein, 10 aa, HIV-1
LPGRWKPKMI

SEQ ID NO: 987 - protein, 10 aa, HIV-1
RWKPKMIGGI

SEQ ID NO: 988 - protein, 10 aa, HIV-1
KMIGGIGGFI

SEQ ID NO: 989 - protein, 10 aa, HIV-1
MIGGIGGFIK

SEQ ID NO: 990 - protein, 10 aa, HIV-1
FIKVRQYDQI

SEQ ID NO: 991 - protein, 10 aa, HIV-1
KVRQYDQILI

SEQ ID NO: 992 - protein, 10 aa, HIV-1
RQYDQILIEI

SEQ ID NO: 993 - protein, 10 aa, HIV-1
QILIEICGHK

SEQ ID NO: 994 - protein, 10 aa, HIV-1
ILIEICGHKA

SEQ ID NO: 995 - protein, 10 aa, HIV-1
GTVLVGPTPV

SEQ ID NO: 996 - protein, 10 aa, HIV-1
VLVGPTPVNI

SEQ ID NO: 997 - protein, 10 aa, HIV-1
LVGPTPVNII

SEQ ID NO: 998 - protein, 10 aa, HIV-1
TPVNIIGRNL

SEQ ID NO: 999 - protein, 10 aa, HIV-1
IIGRNLLTQI

SEQ ID NO: 1000 - protein, 10 aa, HIV-1
NLLTQIGCTL

SEQ ID NO: 1001 - protein, 10 aa, HIV-1
TQIGCTLNFP

SEQ ID NO: 1002 - protein, 10 aa, HIV-1
QIGCTLNFPI

SEQ ID NO: 1003 - protein, 10 aa, HIV-1
CTLNFPISPI

SEQ ID NO: 1004 - protein, 10 aa, HIV-1
FPISPIETVP

SEQ ID NO: 1005 - protein, 10 aa, HIV-1
PISPIETVPV

SEQ ID NO: 1006 - protein, 10 aa, HIV-1
ISPIETVPVK

SEQ ID NO: 1007 - protein, 10 aa, HIV-1
SPIETVPVKL

SEQ ID NO: 1008 - protein, 10 aa, HIV-1
TVPVKLKPGM

SEQ ID NO: 1009 - protein, 10 aa, HIV-1
KLKPGMDGPK

SEQ ID NO: 1010 - protein, 10 aa, HIV-1
KQWPLTEEKI

SEQ ID NO: 1011 - protein, 10 aa, HIV-1
WPLTEEKIKA

SEQ ID NO: 1012 - protein, 10 aa, HIV-1
PLTEEKIKAL

SEQ ID NO: 1013 - protein, 10 aa, HIV-1
LTEEKIKALV

SEQ ID NO: 1014 - protein, 10 aa, HIV-1
EEKIKALVEI

SEQ ID NO: 1015 - protein, 10 aa, HIV-1
KALVEICTEM

SEQ ID NO: 1016 - protein, 10 aa, HIV-1
LVEICTEMEK

SEQ ID NO: 1017 - protein, 10 aa, HIV-1
MEKEGKISKI

SEQ ID NO: 1018 - protein, 10 aa, HIV-1
ISKIGPENPY

SEQ ID NO: 1019 - protein, 10 aa, HIV-1
GPENPYNTPV

SEQ ID NO: 1020 - protein, 10 aa, HIV-1
PENPYNTPVF

SEQ ID NO: 1021 - protein, 10 aa, HIV-1
NPYNTPVFAI

SEQ ID NO: 1022 - protein, 10 aa, HIV-1
PYNTPVFAIK

SEQ ID NO: 1023 - protein, 10 aa, HIV-1
YNTPVFAIKK

SEQ ID NO: 1024 - protein, 10 aa, HIV-1
NTPVFAIKKK

SEQ ID NO: 1025 - protein, 10 aa, HIV-1
FAIKKKDSTK

SEQ ID NO: 1026 - protein, 10 aa, HIV-1
KKKDSTKWRK

SEQ ID NO: 1027 - protein, 10 aa, HIV-1
STKWRKLVDF

SEQ ID NO: 1028 - protein, 10 aa, HIV-1
KLVDFRELNK

SEQ ID NO: 1029 - protein, 10 aa, HIV-1
LVDFRELNKR

SEQ ID NO: 1030 - protein, 10 aa, HIV-1
RELNKRTQDF

SEQ ID NO: 1031 - protein, 10 aa, HIV-1
RTQDFWEVQL

SEQ ID NO: 1032 - protein, 10 aa, HIV-1
WEVQLGIPHP

SEQ ID NO: 1033 - protein, 10 aa, HIV-1
EVQLGIPHPA

SEQ ID NO: 1034 - protein, 10 aa, HIV-1
QLGIPHPAGL

SEQ ID NO: 1035 - protein, 10 aa, HIV-1
GIPHPAGLKK

SEQ ID NO: 1036 - protein, 10 aa, HIV-1
IPHPAGLKKK

SEQ ID NO: 1037 - protein, 10 aa, HIV-1
GLKKKKSVTV

SEQ ID NO: 1038 - protein, 10 aa, HIV-1
VTVLDVGDAY

SEQ ID NO: 1039 - protein, 10 aa, HIV-1
TVLDVGDAYF

SEQ ID NO: 1040 - protein, 10 aa, HIV-1
VLDVGDAYFS

SEQ ID NO: 1041 - protein, 10 aa, HIV-1
YFSVPLDEDF

SEQ ID NO: 1042 - protein, 10 aa, HIV-1
FSVPLDEDFR

SEQ ID NO: 1043 - protein, 10 aa, HIV-1
SVPLDEDFRK

SEQ ID NO: 1044 - protein, 10 aa, HIV-1
VPLDEDFRKY

SEQ ID NO: 1045 - protein, 10 aa, HIV-1
PLDEDFRKYT

SEQ ID NO: 1046 - protein, 10 aa, HIV-1
DFRKYTAFTI

SEQ ID NO: 1047 - protein, 10 aa, HIV-1
KYTAFTIPSI

SEQ ID NO: 1048 - protein, 10 aa, HIV-1
FTIPSINNET

SEQ ID NO: 1049 - protein, 10 aa, HIV-1
SINNETPGIR

SEQ ID NO: 1050 - protein, 10 aa, HIV-1
NETPGIRYQY

SEQ ID NO: 1051 - protein, 10 aa, HIV-1
YQYNVLPQGW

SEQ ID NO: 1052 - protein, 10 aa, HIV-1
QYNVLPQGWK

SEQ ID NO: 1053 - protein, 10 aa, HIV-1
LPQGWKGSPA

SEQ ID NO: 1054 - protein, 10 aa, HIV-1
SPAIFQSSMT

SEQ ID NO: 1055 - protein, 10 aa, HIV-1
PAIFQSSMTK

SEQ ID NO: 1056 - protein, 10 aa, HIV-1
AIFQSSMTKI

SEQ ID NO: 1057 - protein, 10 aa, HIV-1
IFQSSMTKIL

SEQ ID NO: 1058 - protein, 10 aa, HIV-1
SSMTKILEPF

SEQ ID NO: 1059 - protein, 10 aa, HIV-1
SMTKILEPFR

SEQ ID NO: 1060 - protein, 10 aa, HIV-1
MTKILEPFRK

SEQ ID NO: 1061 - protein, 10 aa, HIV-1
KQNPDIVIYQ

SEQ ID NO: 1062 - protein, 10 aa, HIV-1
NPDIVIYQYM

SEQ ID NO: 1063 - protein, 10 aa, HIV-1
IVIYQYMDDL

SEQ ID NO: 1064 - protein, 10 aa, HIV-1
VIYQYMDDLY

SEQ ID NO: 1065 - protein, 10 aa, HIV-1
IYQYMDDLYV

SEQ ID NO: 1066 - protein, 10 aa, HIV-1
YMDDLYVGSD

SEQ ID NO: 1067 - protein, 10 aa, HIV-1
DLYVGSDLEI

SEQ ID NO: 1068 - protein, 10 aa, HIV-1
LEIGQHRTKI

SEQ ID NO: 1069 - protein, 10 aa, HIV-1
KIEELRQHLL

SEQ ID NO: 1070 - protein, 10 aa, HIV-1
EELRQHLLRW

SEQ ID NO: 1071 - protein, 10 aa, HIV-1
RQHLLRWGLT

SEQ ID NO: 1072 - protein, 10 aa, HIV-1
HLLRWGLTTP

SEQ ID NO: 1073 - protein, 10 aa, HIV-1
LLRWGLTTPD

SEQ ID NO: 1074 - protein, 10 aa, HIV-1
LRWGLTTPDK

SEQ ID NO: 1075 - protein, 10 aa, HIV-1
RWGLTTPDKK

SEQ ID NO: 1076 - protein, 10 aa, HIV-1
LTTPDKKHQK

SEQ ID NO: 1077 - protein, 10 aa, HIV-1
KHQKEPPFLW

SEQ ID NO: 1078 - protein, 10 aa, HIV-1
HQKEPPFLWM

SEQ ID NO: 1079 - protein, 10 aa, HIV-1
KEPPFLWMGY

SEQ ID NO: 1080 - protein, 10 aa, HIV-1
FLWMGYELHP

SEQ ID NO: 1081 - protein, 10 aa, HIV-1
MGYELHPDKW

SEQ ID NO: 1082 - protein, 10 aa, HIV-1
YELHPDKWTV

SEQ ID NO: 1083 - protein, 10 aa, HIV-1
ELHPDKWTVQ

SEQ ID NO: 1084 - protein, 10 aa, HIV-1
HPDKWTVQPI

SEQ ID NO: 1085 - protein, 10 aa, HIV-1
TVQPIVLPEK

SEQ ID NO: 1086 - protein, 10 aa, HIV-1
VLPEKDSWTV

SEQ ID NO: 1087 - protein, 10 aa, HIV-1
DSWTVNDIQK

SEQ ID NO: 1088 - protein, 10 aa, HIV-1
SWTVNDIQKL

SEQ ID NO: 1089 - protein, 10 aa, HIV-1
WTVNDIQKLV

SEQ ID NO: 1090 - protein, 10 aa, HIV-1
KLVGKLNWAS

SEQ ID NO: 1091 - protein, 10 aa, HIV-1
NWASQIYPGI

SEQ ID NO: 1092 - protein, 10 aa, HIV-1
WASQIYPGIK

SEQ ID NO: 1093 - protein, 10 aa, HIV-1
QIYPGIKVRQ

SEQ ID NO: 1094 - protein, 10 aa, HIV-1
IYPGIKVRQL

SEQ ID NO: 1095 - protein, 10 aa, HIV-1
KVRQLCKLLR

SEQ ID NO: 1096 - protein, 10 aa, HIV-1
RQLCKLLRGT

SEQ ID NO: 1097 - protein, 10 aa, HIV-1
QLCKLLRGTK

SEQ ID NO: 1098 - protein, 10 aa, HIV-1
KLLRGTKALT

SEQ ID NO: 1099 - protein, 10 aa, HIV-1
ALTEVIPLTE

SEQ ID NO: 1100 - protein, 10 aa, HIV-1
EVIPLTEEAE

SEQ ID NO: 1101 - protein, 10 aa, HIV-1
VIPLTEEAEL

SEQ ID NO: 1102 - protein, 10 aa, HIV-1
PLTEEAELEL

SEQ ID NO: 1103 - protein, 10 aa, HIV-1
EAELELAENR

SEQ ID NO: 1104 - protein, 10 aa, HIV-1
LELAENREIL

SEQ ID NO: 1105 - protein, 10 aa, HIV-1
ELAENREILK

SEQ ID NO: 1106 - protein, 10 aa, HIV-1
EILKEPVHGV

SEQ ID NO: 1107 - protein, 10 aa, HIV-1
ILKEPVHGVY

SEQ ID NO: 1108 - protein, 10 aa, HIV-1
VYYDPSKDLI

SEQ ID NO: 1109 - protein, 10 aa, HIV-1
DPSKDLIAEI

SEQ ID NO: 1110 - protein, 10 aa, HIV-1
AEIQKQGQGQ

SEQ ID NO: 1111 - protein, 10 aa, HIV-1
KQGQGQWTYQ

SEQ ID NO: 1112 - protein, 10 aa, HIV-1
GQGQWTYQIY

SEQ ID NO: 1113 - protein, 10 aa, HIV-1
WTYQIYQEPF

SEQ ID NO: 1114 - protein, 10 aa, HIV-1
TYQIYQEPFK

SEQ ID NO: 1115 - protein, 10 aa, HIV-1
QIYQEPFKNL

SEQ ID NO: 1116 - protein, 10 aa, HIV-1
IYQEPFKNLK

SEQ ID NO: 1117 - protein, 10 aa, HIV-1
EPFKNLKTGK

SEQ ID NO: 1118 - protein, 10 aa, HIV-1
PFKNLKTGKY

SEQ ID NO: 1119 - protein, 10 aa, HIV-1
KNLKTGKYAR

SEQ ID NO: 1120 - protein, 10 aa, HIV-1
NLKTGKYARM

SEQ ID NO: 1121 - protein, 10 aa, HIV-1
LKTGKYARMR

SEQ ID NO: 1122 - protein, 10 aa, HIV-1
RMRGAHTNDV

SEQ ID NO: 1123 - protein, 10 aa, HIV-1
KQLTEAVQKI

SEQ ID NO: 1124 - protein, 10 aa, HIV-1
AVQKITTESI

SEQ ID NO: 1125 - protein, 10 aa, HIV-1
VQKITTESIV

SEQ ID NO: 1126 - protein, 10 aa, HIV-1
KITTESIVIW

SEQ ID NO: 1127 - protein, 10 aa, HIV-1
TTESIVIWGK

SEQ ID NO: 1128 - protein, 10 aa, HIV-1
SIVIWGKTPK

SEQ ID NO: 1129 - protein, 10 aa, HIV-1
IVIWGKTPKF

SEQ ID NO: 1130 - protein, 10 aa, HIV-1
VIWGKTPKFK

SEQ ID NO: 1131 - protein, 10 aa, HIV-1
IWGKTPKFKL

SEQ ID NO: 1132 - protein, 10 aa, HIV-1
LPIQKETWET

SEQ ID NO: 1133 - protein, 10 aa, HIV-1
ETWETWWTEY

SEQ ID NO: 1134 - protein, 10 aa, HIV-1
ETWWTEYWQA

SEQ ID NO: 1135 - protein, 10 aa, HIV-1
YWQATWIPEW

SEQ ID NO: 1136 - protein, 10 aa, HIV-1
WQATWIPEWE

SEQ ID NO: 1137 - protein, 10 aa, HIV-1
QATWIPEWEF

SEQ ID NO: 1138 - protein, 10 aa, HIV-1
ATWIPEWEFV

SEQ ID NO: 1139 - protein, 10 aa, HIV-1
WIPEWEFVNT

SEQ ID NO: 1140 - protein, 10 aa, HIV-1
WEFVNTPPLV

SEQ ID NO: 1141 - protein, 10 aa, HIV-1
EFVNTPPLVK

SEQ ID NO: 1142 - protein, 10 aa, HIV-1
FVNTPPLVKL

SEQ ID NO: 1143 - protein, 10 aa, HIV-1
NTPPLVKLWY

SEQ ID NO: 1144 - protein, 10 aa, HIV-1
LVKLWYQLEK

SEQ ID NO: 1145 - protein, 10 aa, HIV-1
QLEKEPIVGA

SEQ ID NO: 1146 - protein, 10 aa, HIV-1
EPIVGAETFY

SEQ ID NO: 1147 - protein, 10 aa, HIV-1
PIVGAETFYV

SEQ ID NO: 1148 - protein, 10 aa, HIV-1
AETFYVDGAA

SEQ ID NO: 1149 - protein, 10 aa, HIV-1
TFYVDGAANR

SEQ ID NO: 1150 - protein, 10 aa, HIV-1
YVDGAANRET

SEQ ID NO: 1151 - protein, 10 aa, HIV-1
AANRETKLGK

SEQ ID NO: 1152 - protein, 10 aa, HIV-1
RETKLGKAGY

SEQ ID NO: 1153 - protein, 10 aa, HIV-1
ETKLGKAGYV

SEQ ID NO: 1154 - protein, 10 aa, HIV-1
KAGYVTNRGR

SEQ ID NO: 1155 - protein, 10 aa, HIV-1
GYVTNRGRQK

SEQ ID NO: 1156 - protein, 10 aa, HIV-1
YVTNRGRQKV

SEQ ID NO: 1157 - protein, 10 aa, HIV-1
VTNRGRQKVV

SEQ ID NO: 1158 - protein, 10 aa, HIV-1
NRGRQKVVTL

SEQ ID NO: 1159 - protein, 10 aa, HIV-1
VTLTDTTNQK

SEQ ID NO: 1160 - protein, 10 aa, HIV-1
TLTDTTNQKT

SEQ ID NO: 1161 - protein, 10 aa, HIV-1
NQKTELQAIY

SEQ ID NO: 1162 - protein, 10 aa, HIV-1
TELQAIYLAL

SEQ ID NO: 1163 - protein, 10 aa, HIV-1
ELQAIYLALQ

SEQ ID NO: 1164 - protein, 10 aa, HIV-1
IYLALQDSGL

SEQ ID NO: 1165 - protein, 10 aa, HIV-1
LALQDSGLEV

SEQ ID NO: 1166 - protein, 10 aa, HIV-1
LQDSGLEVNI

SEQ ID NO: 1167 - protein, 10 aa, HIV-1
EVNIVTDSQY

SEQ ID NO: 1168 - protein, 10 aa, HIV-1
NIVTDSQYAL

SEQ ID NO: 1169 - protein, 10 aa, HIV-1
SQYALGIIQA

SEQ ID NO: 1170 - protein, 10 aa, HIV-1
AQPDQSESEL

SEQ ID NO: 1171 - protein, 10 aa, HIV-1
SESELVNQII

SEQ ID NO: 1172 - protein, 10 aa, HIV-1
ELVNQIIEQL

SEQ ID NO: 1173 - protein, 10 aa, HIV-1
LVNQIIEQLI

SEQ ID NO: 1174 - protein, 10 aa, HIV-1
NQIIEQLIKK

SEQ ID NO: 1175 - protein, 10 aa, HIV-1
QLIKKEKVYL

SEQ ID NO: 1176 - protein, 10 aa, HIV-1
LIKKEKVYLA

SEQ ID NO: 1177 - protein, 10 aa, HIV-1
EKVYLAWVPA

SEQ ID NO: 1178 - protein, 10 aa, HIV-1
KVYLAWVPAH

SEQ ID NO: 1179 - protein, 10 aa, HIV-1
VYLAWVPAHK

SEQ ID NO: 1180 - protein, 10 aa, HIV-1
YLAWVPAHKG

SEQ ID NO: 1181 - protein, 10 aa, HIV-1
LAWVPAHKGI

SEQ ID NO: 1182 - protein, 10 aa, HIV-1
QVDKLVSAGI

SEQ ID NO: 1183 - protein, 10 aa, HIV-1
KLVSAGIRKV

SEQ ID NO: 1184 - protein, 10 aa, HIV-1
VSAGIRKVLF

SEQ ID NO: 1185 - protein, 10 aa, HIV-1
KVLFLDGIDK

SEQ ID NO: 1186 - protein, 10 aa, HIV-1
VLFLDGIDKA

SEQ ID NO: 1187 - protein, 10 aa, HIV-1
FLDGIDKAQD

SEQ ID NO: 1188 - protein, 10 aa, HIV-1
DEHEKYHSNW

SEQ ID NO: 1189 - protein, 10 aa, HIV-1
WRAMASDFNL

SEQ ID NO: 1190 - protein, 10 aa, HIV-1
MASDFNLPPV

SEQ ID NO: 1191 - protein, 10 aa, HIV-1
NLPPVVAKEI

SEQ ID NO: 1192 - protein, 10 aa, HIV-1
LPPVVAKEIV

SEQ ID NO: 1193 - protein, 10 aa, HIV-1
PPVVAKEIVA

SEQ ID NO: 1194 - protein, 10 aa, HIV-1
IVASCDKCQL

SEQ ID NO: 1195 - protein, 10 aa, HIV-1
VASCDKCQLK

SEQ ID NO: 1196 - protein, 10 aa, HIV-1
GIWQLDCTHL

SEQ ID NO: 1197 - protein, 10 aa, HIV-1
THLEGKVILV

SEQ ID NO: 1198 - protein, 10 aa, HIV-1
HLEGKVILVA

SEQ ID NO: 1199 - protein, 10 aa, HIV-1
KVILVAVHVA

SEQ ID NO: 1200 - protein, 10 aa, HIV-1
LVAVHVASGY

SEQ ID NO: 1201 - protein, 10 aa, HIV-1
VASGYIEAEV

SEQ ID NO: 1202 - protein, 10 aa, HIV-1
AEVIPAETGQ

SEQ ID NO: 1203 - protein, 10 aa, HIV-1
IPAETGQETA

SEQ ID NO: 1204 - protein, 10 aa, HIV-1
PAETGQETAY

SEQ ID NO: 1205 - protein, 10 aa, HIV-1
AETGQETAYF

SEQ ID NO: 1206 - protein, 10 aa, HIV-1
ETGQETAYFL

SEQ ID NO: 1207 - protein, 10 aa, HIV-1
GQETAYFLLK

SEQ ID NO: 1208 - protein, 10 aa, HIV-1
QETAYFLLKL

SEQ ID NO: 1209 - protein, 10 aa, HIV-1
ETAYFLLKLA

SEQ ID NO: 1210 - protein, 10 aa, HIV-1
AYFLLKLAGR

SEQ ID NO: 1211 - protein, 10 aa, HIV-1
YFLLKLAGRW

SEQ ID NO: 1212 - protein, 10 aa, HIV-1
LLKLAGRWPV

SEQ ID NO: 1213 - protein, 10 aa, HIV-1
LKLAGRWPVK

SEQ ID NO: 1214 - protein, 10 aa, HIV-1
KLAGRWPVKT

SEQ ID NO: 1215 - protein, 10 aa, HIV-1
TIHTDNGSNF

SEQ ID NO: 1216 - protein, 10 aa, HIV-1
NGSNFTGATV

SEQ ID NO: 1217 - protein, 10 aa, HIV-1
GSNFTGATVR

SEQ ID NO: 1218 - protein, 10 aa, HIV-1
TGATVRAACW

SEQ ID NO: 1219 - protein, 10 aa, HIV-1
GATVRAACWW

SEQ ID NO: 1220 - protein, 10 aa, HIV-1
ATVRAACWWA

SEQ ID NO: 1221 - protein, 10 aa, HIV-1
RAACWWAGIK

SEQ ID NO: 1222 - protein, 10 aa, HIV-1
CWWAGIKQEF

SEQ ID NO: 1223 - protein, 10 aa, HIV-1
GIKQEFGIPY

SEQ ID NO: 1224 - protein, 10 aa, HIV-1
IPYNPQSQGV

SEQ ID NO: 1225 - protein, 10 aa, HIV-1
SQGVVESMNK

SEQ ID NO: 1226 - protein, 10 aa, HIV-1
GVVESMNKEL

SEQ ID NO: 1227 - protein, 10 aa, HIV-1
VVESMNKELK

SEQ ID NO: 1228 - protein, 10 aa, HIV-1
SMNKELKKII

SEQ ID NO: 1229 - protein, 10 aa, HIV-1
ELKKIIGQVR

SEQ ID NO: 1230 - protein, 10 aa, HIV-1
GQVRDQAEHL

SEQ ID NO: 1231 - protein, 10 aa, HIV-1
QVRDQAEHLK

SEQ ID NO: 1232 - protein, 10 aa, HIV-1
AEHLKTAVQM

SEQ ID NO: 1233 - protein, 10 aa, HIV-1
HLKTAVQMAV

SEQ ID NO: 1234 - protein, 10 aa, HIV-1
KTAVQMAVFI

SEQ ID NO: 1235 - protein, 10 aa, HIV-1
TAVQMAVFIH

SEQ ID NO: 1236 - protein, 10 aa, HIV-1
VQMAVFIHNF

SEQ ID NO: 1237 - protein, 10 aa, HIV-1
QMAVFIHNFK

SEQ ID NO: 1238 - protein, 10 aa, HIV-1
MAVFIHNFKR

SEQ ID NO: 1239 - protein, 10 aa, HIV-1
AVFIHNFKRK

SEQ ID NO: 1240 - protein, 10 aa, HIV-1
FKRKGGIGGY

SEQ ID NO: 1241 - protein, 10 aa, HIV-1
RIVDIIATDI

SEQ ID NO: 1242 - protein, 10 aa, HIV-1
DIIATDIQTK

SEQ ID NO: 1243 - protein, 10 aa, HIV-1
KQITKIQNFR

SEQ ID NO: 1244 - protein, 10 aa, HIV-1
QITKIQNFRV

SEQ ID NO: 1245 - protein, 10 aa, HIV-1
ITKIQNFRVY

SEQ ID NO: 1246 - protein, 10 aa, HIV-1
KIQNFRVYYR

SEQ ID NO: 1247 - protein, 10 aa, HIV-1
NFRVYYRDSR

SEQ ID NO: 1248 - protein, 10 aa, HIV-1
VYYRDSRNPL

SEQ ID NO: 1249 - protein, 10 aa, HIV-1
YYRDSRNPLW

SEQ ID NO: 1250 - protein, 10 aa, HIV-1
RNPLWKGPAK

SEQ ID NO: 1251 - protein, 10 aa, HIV-1
NPLWKGPAKL

SEQ ID NO: 1252 - protein, 10 aa, HIV-1
PLWKGPAKLL

SEQ ID NO: 1253 - protein, 10 aa, HIV-1
KLLWKGEGAV

SEQ ID NO: 1254 - protein, 10 aa, HIV-1
LLWKGEGAVV

SEQ ID NO: 1255 - protein, 10 aa, HIV-1
VVIQDNSDIK

SEQ ID NO: 1256 - protein, 10 aa, HIV-1
VIQDNSDIKV

SEQ ID NO: 1257 - protein, 10 aa, HIV-1
IQDNSDIKVV

SEQ ID NO: 1258 - protein, 10 aa, HIV-1
DNSDIKVVPR

SEQ ID NO: 1259 - protein, 10 aa, HIV-1
NSDIKVVPRR

SEQ ID NO: 1260 - protein, 10 aa, HIV-1
RRKAKIIRDY

SEQ ID NO: 1261 - protein, 10 aa, HIV-1
KAKIIRDYGK

SEQ ID NO: 1262 - protein, 10 aa, HIV-1
KIIRDYGKQM

SEQ ID NO: 1263 - protein, 10 aa, HIV-1
IIRDYGKQMA

SEQ ID NO: 1264 - protein, 10 aa, HIV-1
KQMAGDDCVA

SEQ ID NO: 1265 - protein, 10 aa, HIV-1
MAGDDCVASR

SEQ ID NO: 1266 - protein, 11 aa, HIV-1
VLSGGELDRWE

SEQ ID NO: 1267 - protein, 11 aa, HIV-1
LSGGELDRWEK

SEQ ID NO: 1268 - protein, 11 aa, HIV-1
GELDRWEKIRL

SEQ ID NO: 1269 - protein, 11 aa, HIV-1
ELDRWEKIRLR

SEQ ID NO: 1270 - protein, 11 aa, HIV-1
KIRLRPGGKKK

SEQ ID NO: 1271 - protein, 11 aa, HIV-1
RLRPGGKKKYK

SEQ ID NO: 1272 - protein, 11 aa, HIV-1
HIVWASRELER

SEQ ID NO: 1273 - protein, 11 aa, HIV-1
WASRELERFAV

SEQ ID NO: 1274 - protein, 11 aa, HIV-1
ELERFAVNPGL

SEQ ID NO: 1275 - protein, 11 aa, HIV-1
LERFAVNPGLL

SEQ ID NO: 1276 - protein, 11 aa, HIV-1
GLLETSEGCRQ

SEQ ID NO: 1277 - protein, 11 aa, HIV-1
LLETSEGCRQI

SEQ ID NO: 1278 - protein, 11 aa, HIV-1
LETSEGCRQIL

SEQ ID NO: 1279 - protein, 11 aa, HIV-1
SEGCRQILGQL

SEQ ID NO: 1280 - protein, 11 aa, HIV-1
RQILGQLQPSL

SEQ ID NO: 1281 - protein, 11 aa, HIV-1
ILGQLQPSLQT

SEQ ID NO: 1282 - protein, 11 aa, HIV-1
QPSLQTGSEEL

SEQ ID NO: 1283 - protein, 11 aa, HIV-1
LQTGSEELRSL

SEQ ID NO: 1284 - protein, 11 aa, HIV-1
QTGSEELRSLY

SEQ ID NO: 1285 - protein, 11 aa, HIV-1
SEELRSLYNTV

SEQ ID NO: 1286 - protein, 11 aa, HIV-1
RSLYNTVATLY

SEQ ID NO: 1287 - protein, 11 aa, HIV-1
SLYNTVATLYC

SEQ ID NO: 1288 - protein, 11 aa, HIV-1
LYNTVATLYCV

SEQ ID NO: 1289 - protein, 11 aa, HIV-1
NTVATLYCVHQ

SEQ ID NO: 1290 - protein, 11 aa, HIV-1
TVATLYCVHQR

SEQ ID NO: 1291 - protein, 11 aa, HIV-1
TLYCVHQRIEI

SEQ ID NO: 1292 - protein, 11 aa, HIV-1
LYCVHQRIEIK

SEQ ID NO: 1293 - protein, 11 aa, HIV-1
EIKDTKEALDK

SEQ ID NO: 1294 - protein, 11 aa, HIV-1
ALDKIEEEQNK

SEQ ID NO: 1295 - protein, 11 aa, HIV-1
AAADTGHSNQV

SEQ ID NO: 1296 - protein, 11 aa, HIV-1
HSNQVSQNYPI

SEQ ID NO: 1297 - protein, 11 aa, HIV-1
YPIVQNIQGQM

SEQ ID NO: 1298 - protein, 11 aa, HIV-1
PIVQNIQGQMV

SEQ ID NO: 1299 - protein, 11 aa, HIV-1
NIQGQMVHQAI

SEQ ID NO: 1300 - protein, 11 aa, HIV-1
GQMVHQAISPR

SEQ ID NO: 1301 - protein, 11 aa, HIV-1
MVHQAISPRTL

SEQ ID NO: 1302 - protein, 11 aa, HIV-1
QAISPRTLNAW

SEQ ID NO: 1303 - protein, 11 aa, HIV-1
AISPRTLNAWV

SEQ ID NO: 1304 - protein, 11 aa, HIV-1
ISPRTLNAWVK

SEQ ID NO: 1305 - protein, 11 aa, HIV-1
SPRTLNAWVKV

SEQ ID NO: 1306 - protein, 11 aa, HIV-1
LNAWVKVVEEK

SEQ ID NO: 1307 - protein, 11 aa, HIV-1
AWVKVVEEKAF

SEQ ID NO: 1308 - protein, 11 aa, HIV-1
VVEEKAFSPEV

SEQ ID NO: 1309 - protein, 11 aa, HIV-1
KAFSPEVIPMF

SEQ ID NO: 1310 - protein, 11 aa, HIV-1
FSPEVIPMFSA

SEQ ID NO: 1311 - protein, 11 aa, HIV-1
SPEVIPMFSAL

SEQ ID NO: 1312 - protein, 11 aa, HIV-1
EVIPMFSALSE

SEQ ID NO: 1313 - protein, 11 aa, HIV-1
IPMFSALSEGA

SEQ ID NO: 1314 - protein, 11 aa, HIV-1
ALSEGATPQDL

SEQ ID NO: 1315 - protein, 11 aa, HIV-1
EGATPQDLNTM

SEQ ID NO: 1316 - protein, 11 aa, HIV-1
PQDLNTMLNTV

SEQ ID NO: 1317 - protein, 11 aa, HIV-1
TMLNTVGGHQA

SEQ ID NO: 1318 - protein, 11 aa, HIV-1
MLNTVGGHQAA

SEQ ID NO: 1319 - protein, 11 aa, HIV-1
TVGGHQAAMQM

SEQ ID NO: 1320 - protein, 11 aa, HIV-1
GGHQAAMQMLK

SEQ ID NO: 1321 - protein, 11 aa, HIV-1
QAAMQMLKETI

SEQ ID NO: 1322 - protein, 11 aa, HIV-1
MQMLKETINEE

SEQ ID NO: 1323 - protein, 11 aa, HIV-1
QMLKETINEEA

SEQ ID NO: 1324 - protein, 11 aa, HIV-1
MLKETINEEAA

SEQ ID NO: 1325 - protein, 11 aa, HIV-1
TINEEAAEWDR

SEQ ID NO: 1326 - protein, 11 aa, HIV-1
EAAEWDRVHPV

SEQ ID NO: 1327 - protein, 11 aa, HIV-1
RVHPVHAGPIA

SEQ ID NO: 1328 - protein, 11 aa, HIV-1
HPVHAGPIAPG

SEQ ID NO: 1329 - protein, 11 aa, HIV-1
HAGPIAPGQMR

SEQ ID NO: 1330 - protein, 11 aa, HIV-1
TTSTLQEQIGW

SEQ ID NO: 1331 - protein, 11 aa, HIV-1
QIGWMTNNPPI

SEQ ID NO: 1332 - protein, 11 aa, HIV-1
IPVGEIYKRWI

SEQ ID NO: 1333 - protein, 11 aa, HIV-1
EIYKRWIILGL

SEQ ID NO: 1334 - protein, 11 aa, HIV-1
KRWIILGLNKI

SEQ ID NO: 1335 - protein, 11 aa, HIV-1
WIILGLNKIVR

SEQ ID NO: 1336 - protein, 11 aa, HIV-1
IILGLNKIVRM

SEQ ID NO: 1337 - protein, 11 aa, HIV-1
KIVRMYSPTSI

SEQ ID NO: 1338 - protein, 11 aa, HIV-1
IVRMYSPTSIL

SEQ ID NO: 1339 - protein, 11 aa, HIV-1
RMYSPTSILDI

SEQ ID NO: 1340 - protein, 11 aa, HIV-1
MYSPTSILDIR

SEQ ID NO: 1341 - protein, 11 aa, HIV-1
TSILDIRQGPK

SEQ ID NO: 1342 - protein, 11 aa, HIV-1
DIRQGPKEPFR

SEQ ID NO: 1343 - protein, 11 aa, HIV-1
RQGPKEPFRDY

SEQ ID NO: 1344 - protein, 11 aa, HIV-1
QGPKEPFRDYV

SEQ ID NO: 1345 - protein, 11 aa, HIV-1
EPFRDYVDRFY

SEQ ID NO: 1346 - protein, 11 aa, HIV-1
PFRDYVDRFYK

SEQ ID NO: 1347 - protein, 11 aa, HIV-1
DYVDRFYKTLR

SEQ ID NO: 1348 - protein, 11 aa, HIV-1
YVDRFYKTLRA

SEQ ID NO: 1349 - protein, 11 aa, HIV-1
TLRAEQASQEV

SEQ ID NO: 1350 - protein, 11 aa, HIV-1
AEQASQEVKNW

SEQ ID NO: 1351 - protein, 11 aa, HIV-1
QEVKNWMTETL

SEQ ID NO: 1352 - protein, 11 aa, HIV-1
EVKNWMTETLL

SEQ ID NO: 1353 - protein, 11 aa, HIV-1
WMTETLLVQNA

SEQ ID NO: 1354 - protein, 11 aa, HIV-1
LLVQNANPDCK

SEQ ID NO: 1355 - protein, 11 aa, HIV-1
NANPDCKTILK

SEQ ID NO: 1356 - protein, 11 aa, HIV-1
NPDCKTILKAL

SEQ ID NO: 1357 - protein, 11 aa, HIV-1
KTILKALGPAA

SEQ ID NO: 1358 - protein, 11 aa, HIV-1
ILKALGPAATL

SEQ ID NO: 1359 - protein, 11 aa, HIV-1
ALGPAATLEEM

SEQ ID NO: 1360 - protein, 11 aa, HIV-1
EEMMTACQGVG

SEQ ID NO: 1361 - protein, 11 aa, HIV-1
MTACQGVGGPG

SEQ ID NO: 1362 - protein, 11 aa, HIV-1
ACQGVGGPGHK

SEQ ID NO: 1363 - protein, 11 aa, HIV-1
GVGGPGHKARV

SEQ ID NO: 1364 - protein, 11 aa, HIV-1
KARVLAEAMSQ

SEQ ID NO: 1365 - protein, 11 aa, HIV-1
AEAMSQVTNSA

SEQ ID NO: 1366 - protein, 11 aa, HIV-1
EAMSQVTNSAT

SEQ ID NO: 1367 - protein, 11 aa, HIV-1
AMSQVTNSATI

SEQ ID NO: 1368 - protein, 11 aa, HIV-1
MSQVTNSATIM

SEQ ID NO: 1369 - protein, 11 aa, HIV-1
SQVTNSATIMM

SEQ ID NO: 1370 - protein, 11 aa, HIV-1
VTNSATIMMQR

SEQ ID NO: 1371 - protein, 11 aa, HIV-1
ATIMMQRGNFR

SEQ ID NO: 1372 - protein, 11 aa, HIV-1
MMQRGNFRNQR

SEQ ID NO: 1373 - protein, 11 aa, HIV-1
MQRGNFRNQRK

SEQ ID NO: 1374 - protein, 11 aa, HIV-1
FRNQRKIVKCF

SEQ ID NO: 1375 - protein, 11 aa, HIV-1
HTARNCRAPRK

SEQ ID NO: 1376 - protein, 11 aa, HIV-1
TARNCRAPRKK

SEQ ID NO: 1377 - protein, 11 aa, HIV-1
EGHQMKDCTER

SEQ ID NO: 1378 - protein, 11 aa, HIV-1
DCTERQANFLR

SEQ ID NO: 1379 - protein, 11 aa, HIV-1
RQANFLREDLA

SEQ ID NO: 1380 - protein, 11 aa, HIV-1
QANFLREDLAF

SEQ ID NO: 1381 - protein, 11 aa, HIV-1
LAFLQGKAREF

SEQ ID NO: 1382 - protein, 11 aa, HIV-1
FLQGKAREFSS

SEQ ID NO: 1383 - protein, 11 aa, HIV-1
KAREFSSEQTR

SEQ ID NO: 1384 - protein, 11 aa, HIV-1
EQTRANSPTRR

SEQ ID NO: 1385 - protein, 11 aa, HIV-1
TRANSPTRREL

SEQ ID NO: 1386 - protein, 11 aa, HIV-1
NSPTRRELQVW

SEQ ID NO: 1387 - protein, 11 aa, HIV-1
LQVWGRDNNSP

SEQ ID NO: 1388 - protein, 11 aa, HIV-1
QGTVSFNFPQV

SEQ ID NO: 1389 - protein, 11 aa, HIV-1
TVSFNFPQVTL

SEQ ID NO: 1390 - protein, 11 aa, HIV-1
VSFNFPQVTLW

SEQ ID NO: 1391 - protein, 11 aa, HIV-1
FNFPQVTLWQR

SEQ ID NO: 1392 - protein, 11 aa, HIV-1
FPQVTLWQRPL

SEQ ID NO: 1393 - protein, 11 aa, HIV-1
VTLWQRPLVTI

SEQ ID NO: 1394 - protein, 11 aa, HIV-1
TLWQRPLVTIK

SEQ ID NO: 1395 - protein, 11 aa, HIV-1
LWQRPLVTIKI

SEQ ID NO: 1396 - protein, 11 aa, HIV-1
PLVTIKIGGQL

SEQ ID NO: 1397 - protein, 11 aa, HIV-1
LVTIKIGGQLK

SEQ ID NO: 1398 - protein, 11 aa, HIV-1
KIGGQLKEALL

SEQ ID NO: 1399 - protein, 11 aa, HIV-1
QLKEALLDTGA

SEQ ID NO: 1400 - protein, 11 aa, HIV-1
ALLDTGADDTV

SEQ ID NO: 1401 - protein, 11 aa, HIV-1
LLDTGADDTVL

SEQ ID NO: 1402 - protein, 11 aa, HIV-1
TGADDTVLEEM

SEQ ID NO: 1403 - protein, 11 aa, HIV-1
TVLEEMSLPGR

SEQ ID NO: 1404 - protein, 11 aa, HIV-1
SLPGRWKPKMI

SEQ ID NO: 1405 - protein, 11 aa, HIV-1
GRWKPKMIGGI

SEQ ID NO: 1406 - protein, 11 aa, HIV-1
KPKMIGGIGGF

SEQ ID NO: 1407 - protein, 11 aa, HIV-1
KMIGGIGGFIK

SEQ ID NO: 1408 - protein, 11 aa, HIV-1
MIGGIGGFIKV

SEQ ID NO: 1409 - protein, 11 aa, HIV-1
GFIKVRQYDQI

SEQ ID NO: 1410 - protein, 11 aa, HIV-1
FIKVRQYDQIL

SEQ ID NO: 1411 - protein, 11 aa, HIV-1
RQYDQILIEIC

SEQ ID NO: 1412 - protein, 11 aa, HIV-1
DQILIEICGHK

SEQ ID NO: 1413 - protein, 11 aa, HIV-1
ILIEICGHKAI

SEQ ID NO: 1414 - protein, 11 aa, HIV-1
EICGHKAIGTV

SEQ ID NO: 1415 - protein, 11 aa, HIV-1
TVLVGPTPVNI

SEQ ID NO: 1416 - protein, 11 aa, HIV-1
VLVGPTPVNII

SEQ ID NO: 1417 - protein, 11 aa, HIV-1
TPVNIIGRNLL

SEQ ID NO: 1418 - protein, 11 aa, HIV-1
NIIGRNLLTQI

SEQ ID NO: 1419 - protein, 11 aa, HIV-1
LLTQIGCTLNF

SEQ ID NO: 1420 - protein, 11 aa, HIV-1
TQIGCTLNFPI

SEQ ID NO: 1421 - protein, 11 aa, HIV-1
TLNFPISPIET

SEQ ID NO: 1422 - protein, 11 aa, HIV-1
LNFPISPIETV

SEQ ID NO: 1423 - protein, 11 aa, HIV-1
FPISPIETVPV

SEQ ID NO: 1424 - protein, 11 aa, HIV-1
ETVPVKLKPGM

SEQ ID NO: 1425 - protein, 11 aa, HIV-1
KLKPGMDGPKV

SEQ ID NO: 1426 - protein, 11 aa, HIV-1
GMDGPKVKQWP

SEQ ID NO: 1427 - protein, 11 aa, HIV-1
KVKQWPLTEEK

SEQ ID NO: 1428 - protein, 11 aa, HIV-1
KQWPLTEEKIK

SEQ ID NO: 1429 - protein, 11 aa, HIV-1
WPLTEEKIKAL

SEQ ID NO: 1430 - protein, 11 aa, HIV-1
PLTEEKIKALV

SEQ ID NO: 1431 - protein, 11 aa, HIV-1
ALVEICTEMEK

SEQ ID NO: 1432 - protein, 11 aa, HIV-1
EICTEMEKEGK

SEQ ID NO: 1433 - protein, 11 aa, HIV-1
KISKIGPENPY

SEQ ID NO: 1434 - protein, 11 aa, HIV-1
GPENPYNTPVF

SEQ ID NO: 1435 - protein, 11 aa, HIV-1
ENPYNTPVFAI

SEQ ID NO: 1436 - protein, 11 aa, HIV-1
NPYNTPVFAIK

SEQ ID NO: 1437 - protein, 11 aa, HIV-1
PYNTPVFAIKK

SEQ ID NO: 1438 - protein, 11 aa, HIV-1
FAIKKKDSTKW

SEQ ID NO: 1439 - protein, 11 aa, HIV-1
AIKKKDSTKWR

SEQ ID NO: 1440 - protein, 11 aa, HIV-1
KKDSTKWRKLV

SEQ ID NO: 1441 - protein, 11 aa, HIV-1
STKWRKLVDFR

SEQ ID NO: 1442 - protein, 11 aa, HIV-1
KLVDFRELNKR

SEQ ID NO: 1443 - protein, 11 aa, HIV-1
TQDFWEVQLGI

SEQ ID NO: 1444 - protein, 11 aa, HIV-1
WEVQLGIPHPA

SEQ ID NO: 1445 - protein, 11 aa, HIV-1
VQLGIPHPAGL

SEQ ID NO: 1446 - protein, 11 aa, HIV-1
QLGIPHPAGLK

SEQ ID NO: 1447 - protein, 11 aa, HIV-1
LGIPHPAGLKK

SEQ ID NO: 1448 - protein, 11 aa, HIV-1
GIPHPAGLKKK

SEQ ID NO: 1449 - protein, 11 aa, HIV-1
IPHPAGLKKKK

SEQ ID NO: 1450 - protein, 11 aa, HIV-1
HPAGLKKKKSV

SEQ ID NO: 1451 - protein, 11 aa, HIV-1
GLKKKKSVTVL

SEQ ID NO: 1452 - protein, 11 aa, HIV-1
SVTVLDVGDAY

SEQ ID NO: 1453 - protein, 11 aa, HIV-1
VTVLDVGDAYF

SEQ ID NO: 1454 - protein, 11 aa, HIV-1
VLDVGDAYFSV

SEQ ID NO: 1455 - protein, 11 aa, HIV-1
DVGDAYFSVPL

SEQ ID NO: 1456 - protein, 11 aa, HIV-1
AYFSVPLDEDF

SEQ ID NO: 1457 - protein, 11 aa, HIV-1
YFSVPLDEDFR

SEQ ID NO: 1458 - protein, 11 aa, HIV-1
FSVPLDEDFRK

SEQ ID NO: 1459 - protein, 11 aa, HIV-1
SVPLDEDFRKY

SEQ ID NO: 1460 - protein, 11 aa, HIV-1
PLDEDFRKYTA

SEQ ID NO: 1461 - protein, 11 aa, HIV-1
RKYTAFTIPSI

SEQ ID NO: 1462 - protein, 11 aa, HIV-1
IPSINNETPGI

SEQ ID NO: 1463 - protein, 11 aa, HIV-1
SINNETPGIRY

SEQ ID NO: 1464 - protein, 11 aa, HIV-1
ETPGIRYQYNV

SEQ ID NO: 1465 - protein, 11 aa, HIV-1
TPGIRYQYNVL

SEQ ID NO: 1466 - protein, 11 aa, HIV-1
RYQYNVLPQGW

SEQ ID NO: 1467 - protein, 11 aa, HIV-1
YQYNVLPQGWK

SEQ ID NO: 1468 - protein, 11 aa, HIV-1
VLPQGWKGSPA

SEQ ID NO: 1469 - protein, 11 aa, HIV-1
LPQGWKGSPAI

SEQ ID NO: 1470 - protein, 11 aa, HIV-1
KGSPAIFQSSM

SEQ ID NO: 1471 - protein, 11 aa, HIV-1
SPAIFQSSMTK

SEQ ID NO: 1472 - protein, 11 aa, HIV-1
AIFQSSMTKIL

SEQ ID NO: 1473 - protein, 11 aa, HIV-1
QSSMTKILEPF

SEQ ID NO: 1474 - protein, 11 aa, HIV-1
SSMTKILEPFR

SEQ ID NO: 1475 - protein, 11 aa, HIV-1
SMTKILEPFRK

SEQ ID NO: 1476 - protein, 11 aa, HIV-1
EPFRKQNPDIV

SEQ ID NO: 1477 - protein, 11 aa, HIV-1
KQNPDIVIYQY

SEQ ID NO: 1478 - protein, 11 aa, HIV-1
DIVIYQYMDDL

SEQ ID NO: 1479 - protein, 11 aa, HIV-1
IVIYQYMDDLY

SEQ ID NO: 1480 - protein, 11 aa, HIV-1
VIYQYMDDLYV

SEQ ID NO: 1481 - protein, 11 aa, HIV-1
YQYMDDLYVGS

SEQ ID NO: 1482 - protein, 11 aa, HIV-1
YMDDLYVGSDL

SEQ ID NO: 1483 - protein, 11 aa, HIV-1
DLEIGQHRTKI

SEQ ID NO: 1484 - protein, 11 aa, HIV-1
GQHRTKIEELR

SEQ ID NO: 1485 - protein, 11 aa, HIV-1
KIEELRQHLLR

SEQ ID NO: 1486 - protein, 11 aa, HIV-1
ELRQHLLRWGL

SEQ ID NO: 1487 - protein, 11 aa, HIV-1
RQHLLRWGLTT

SEQ ID NO: 1488 - protein, 11 aa, HIV-1
LLRWGLTTPDK

SEQ ID NO: 1489 - protein, 11 aa, HIV-1
LRWGLTTPDKK

SEQ ID NO: 1490 - protein, 11 aa, HIV-1
KKHQKEPPFLW

SEQ ID NO: 1491 - protein, 11 aa, HIV-1
EPPFLWMGYEL

SEQ ID NO: 1492 - protein, 11 aa, HIV-1
FLWMGYELHPD

SEQ ID NO: 1493 - protein, 11 aa, HIV-1
LWMGYELHPDK

SEQ ID NO: 1494 - protein, 11 aa, HIV-1
ELHPDKWTVQP

SEQ ID NO: 1495 - protein, 11 aa, HIV-1
HPDKWTVQPIV

SEQ ID NO: 1496 - protein, 11 aa, HIV-1
WTVQPIVLPEK

SEQ ID NO: 1497 - protein, 11 aa, HIV-1
QPIVLPEKDSW

SEQ ID NO: 1498 - protein, 11 aa, HIV-1
IVLPEKDSWTV

SEQ ID NO: 1499 - protein, 11 aa, HIV-1
TVNDIQKLVGK

SEQ ID NO: 1500 - protein, 11 aa, HIV-1
IQKLVGKLNWA

SEQ ID NO: 1501 - protein, 11 aa, HIV-1
KLVGKLNWASQ

SEQ ID NO: 1502 - protein, 11 aa, HIV-1
LVGKLNWASQI

SEQ ID NO: 1503 - protein, 11 aa, HIV-1
KLNWASQIYPG

SEQ ID NO: 1504 - protein, 11 aa, HIV-1
WASQIYPGIKV

SEQ ID NO: 1505 - protein, 11 aa, HIV-1
ASQIYPGIKVR

SEQ ID NO: 1506 - protein, 11 aa, HIV-1
QIYPGIKVRQL

SEQ ID NO: 1507 - protein, 11 aa, HIV-1
RQLCKLLRGTK

SEQ ID NO: 1508 - protein, 11 aa, HIV-1
KLLRGTKALTE

SEQ ID NO: 1509 - protein, 11 aa, HIV-1
LLRGTKALTEV

SEQ ID NO: 1510 - protein, 11 aa, HIV-1
GTKALTEVIPL

SEQ ID NO: 1511 - protein, 11 aa, HIV-1
ALTEVIPLTEE

SEQ ID NO: 1512 - protein, 11 aa, HIV-1
EVIPLTEEAEL

SEQ ID NO: 1513 - protein, 11 aa, HIV-1
IPLTEEAELEL

SEQ ID NO: 1514 - protein, 11 aa, HIV-1
PLTEEAELELA

SEQ ID NO: 1515 - protein, 11 aa, HIV-1
EEAELELAENR

SEQ ID NO: 1516 - protein, 11 aa, HIV-1
AELELAENREI

SEQ ID NO: 1517 - protein, 11 aa, HIV-1
ELELAENREIL

SEQ ID NO: 1518 - protein, 11 aa, HIV-1
AENREILKEPV

SEQ ID NO: 1519 - protein, 11 aa, HIV-1
REILKEPVHGV

SEQ ID NO: 1520 - protein, 11 aa, HIV-1
EILKEPVHGVY

SEQ ID NO: 1521 - protein, 11 aa, HIV-1
ILKEPVHGVYY

SEQ ID NO: 1522 - protein, 11 aa, HIV-1
EPVHGVYYDPS

SEQ ID NO: 1523 - protein, 11 aa, HIV-1
PVHGVYYDPSK

SEQ ID NO: 1524 - protein, 11 aa, HIV-1
AEIQKQGQGQW

SEQ ID NO: 1525 - protein, 11 aa, HIV-1
IQKQGQGQWTY

SEQ ID NO: 1526 - protein, 11 aa, HIV-1
KQGQGQWTYQI

SEQ ID NO: 1527 - protein, 11 aa, HIV-1
QWTYQIYQEPF

SEQ ID NO: 1528 - protein, 11 aa, HIV-1
WTYQIYQEPFK

SEQ ID NO: 1529 - protein, 11 aa, HIV-1
YQIYQEPFKNL

SEQ ID NO: 1530 - protein, 11 aa, HIV-1
QIYQEPFKNLK

SEQ ID NO: 1531 - protein, 11 aa, HIV-1
EPFKNLKTGKY

SEQ ID NO: 1532 - protein, 11 aa, HIV-1
NLKTGKYARMR

SEQ ID NO: 1533 - protein, 11 aa, HIV-1
RMRGAHTNDVK

SEQ ID NO: 1534 - protein, 11 aa, HIV-1
HTNDVKQLTEA

SEQ ID NO: 1535 - protein, 11 aa, HIV-1
DVKQLTEAVQK

SEQ ID NO: 1536 - protein, 11 aa, HIV-1
QLTEAVQKITT

SEQ ID NO: 1537 - protein, 11 aa, HIV-1
EAVQKITTESI

SEQ ID NO: 1538 - protein, 11 aa, HIV-1
AVQKITTESIV

SEQ ID NO: 1539 - protein, 11 aa, HIV-1
ITTESIVIWGK

SEQ ID NO: 1540 - protein, 11 aa, HIV-1
ESIVIWGKTPK

SEQ ID NO: 1541 - protein, 11 aa, HIV-1
SIVIWGKTPKF

SEQ ID NO: 1542 - protein, 11 aa, HIV-1
IVIWGKTPKFK

SEQ ID NO: 1543 - protein, 11 aa, HIV-1
VIWGKTPKFKL

SEQ ID NO: 1544 - protein, 11 aa, HIV-1
KTPKFKLPIQK

SEQ ID NO: 1545 - protein, 11 aa, HIV-1
KLPIQKETWET

SEQ ID NO: 1546 - protein, 11 aa, HIV-1
LPIQKETWETW

SEQ ID NO: 1547 - protein, 11 aa, HIV-1
IQKETWETWWT

SEQ ID NO: 1548 - protein, 11 aa, HIV-1
KETWETWWTEY

SEQ ID NO: 1549 - protein, 11 aa, HIV-1
ETWETWWTEYW

SEQ ID NO: 1550 - protein, 11 aa, HIV-1
WETWWTEYWQA

SEQ ID NO: 1551 - protein, 11 aa, HIV-1
ETWWTEYWQAT

SEQ ID NO: 1552 - protein, 11 aa, HIV-1
TWWTEYWQATW

SEQ ID NO: 1553 - protein, 11 aa, HIV-1
WWTEYWQATWI

SEQ ID NO: 1554 - protein, 11 aa, HIV-1
EYWQATWIPEW

SEQ ID NO: 1555 - protein, 11 aa, HIV-1
WQATWIPEWEF

SEQ ID NO: 1556 - protein, 11 aa, HIV-1
QATWIPEWEFV

SEQ ID NO: 1557 - protein, 11 aa, HIV-1
PEWEFVNTPPL

SEQ ID NO: 1558 - protein, 11 aa, HIV-1
WEFVNTPPLVK

SEQ ID NO: 1559 - protein, 11 aa, HIV-1
EFVNTPPLVKL

SEQ ID NO: 1560 - protein, 11 aa, HIV-1
FVNTPPLVKLW

SEQ ID NO: 1561 - protein, 11 aa, HIV-1
KLWYQLEKEPI

SEQ ID NO: 1562 - protein, 11 aa, HIV-1
YQLEKEPIVGA

SEQ ID NO: 1563 - protein, 11 aa, HIV-1
EPIVGAETFYV

SEQ ID NO: 1564 - protein, 11 aa, HIV-1
ETFYVDGAANR

SEQ ID NO: 1565 - protein, 11 aa, HIV-1
YVDGAANRETK

SEQ ID NO: 1566 - protein, 11 aa, HIV-1
GAANRETKLGK

SEQ ID NO: 1567 - protein, 11 aa, HIV-1
RETKLGKAGYV

SEQ ID NO: 1568 - protein, 11 aa, HIV-1
KLGKAGYVTNR

SEQ ID NO: 1569 - protein, 11 aa, HIV-1
AGYVTNRGRQK

SEQ ID NO: 1570 - protein, 11 aa, HIV-1
YVTNRGRQKVV

SEQ ID NO: 1571 - protein, 11 aa, HIV-1
VVTLTDTTNQK

SEQ ID NO: 1572 - protein, 11 aa, HIV-1
LTDTTNQKTEL

SEQ ID NO: 1573 - protein, 11 aa, HIV-1
TTNQKTELQAI

SEQ ID NO: 1574 - protein, 11 aa, HIV-1
KTELQAIYLAL

SEQ ID NO: 1575 - protein, 11 aa, HIV-1
AIYLALQDSGL

SEQ ID NO: 1576 - protein, 11 aa, HIV-1
YLALQDSGLEV

SEQ ID NO: 1577 - protein, 11 aa, HIV-1
ALQDSGLEVNI

SEQ ID NO: 1578 - protein, 11 aa, HIV-1
LQDSGLEVNIV

SEQ ID NO: 1579 - protein, 11 aa, HIV-1
LEVNIVTDSQY

SEQ ID NO: 1580 - protein, 11 aa, HIV-1
EVNIVTDSQYA

SEQ ID NO: 1581 - protein, 11 aa, HIV-1
IVTDSQYALGI

SEQ ID NO: 1582 - protein, 11 aa, HIV-1
SQYALGIIQAQ

SEQ ID NO: 1583 - protein, 11 aa, HIV-1
AQPDQSESELV

SEQ ID NO: 1584 - protein, 11 aa, HIV-1
SELVNQIIEQL

SEQ ID NO: 1585 - protein, 11 aa, HIV-1
ELVNQIIEQLI

SEQ ID NO: 1586 - protein, 11 aa, HIV-1
LVNQIIEQLIK

SEQ ID NO: 1587 - protein, 11 aa, HIV-1
QIIEQLIKKEK

SEQ ID NO: 1588 - protein, 11 aa, HIV-1
IIEQLIKKEKV

SEQ ID NO: 1589 - protein, 11 aa, HIV-1
IEQLIKKEKVY

SEQ ID NO: 1590 - protein, 11 aa, HIV-1
QLIKKEKVYLA

SEQ ID NO: 1591 - protein, 11 aa, HIV-1
IKKEKVYLAWV

SEQ ID NO: 1592 - protein, 11 aa, HIV-1
KVYLAWVPAHK

SEQ ID NO: 1593 - protein, 11 aa, HIV-1
YLAWVPAHKGI

SEQ ID NO: 1594 - protein, 11 aa, HIV-1
GIGGNEQVDKL

SEQ ID NO: 1595 - protein, 11 aa, HIV-1
EQVDKLVSAGI

SEQ ID NO: 1596 - protein, 11 aa, HIV-1
QVDKLVSAGIR

SEQ ID NO: 1597 - protein, 11 aa, HIV-1
KLVSAGIRKVL

SEQ ID NO: 1598 - protein, 11 aa, HIV-1
LVSAGIRKVLF

SEQ ID NO: 1599 - protein, 11 aa, HIV-1
GIRKVLFLDGI

SEQ ID NO: 1600 - protein, 11 aa, HIV-1
FLDGIDKAQDE

SEQ ID NO: 1601 - protein, 11 aa, HIV-1
HSNWRAMASDF

SEQ ID NO: 1602 - protein, 11 aa, HIV-1
NWRAMASDFNL

SEQ ID NO: 1603 - protein, 11 aa, HIV-1
AMASDFNLPPV

SEQ ID NO: 1604 - protein, 11 aa, HIV-1
MASDFNLPPVV

SEQ ID NO: 1605 - protein, 11 aa, HIV-1
NLPPVVAKEIV

SEQ ID NO: 1606 - protein, 11 aa, HIV-1
LPPVVAKEIVA

SEQ ID NO: 1607 - protein, 11 aa, HIV-1
EIVASCDKCQL

SEQ ID NO: 1608 - protein, 11 aa, HIV-1
IVASCDKCQLK

SEQ ID NO: 1609 - protein, 11 aa, HIV-1
QLKGEAMHGQV

SEQ ID NO: 1610 - protein, 11 aa, HIV-1
QVDCSPGIWQL

SEQ ID NO: 1611 - protein, 11 aa, HIV-1
QLDCTHLEGKV

SEQ ID NO: 1612 - protein, 11 aa, HIV-1
HLEGKVILVAV

SEQ ID NO: 1613 - protein, 11 aa, HIV-1
ILVAVHVASGY

SEQ ID NO: 1614 - protein, 11 aa, HIV-1
LVAVHVASGYI

SEQ ID NO: 1615 - protein, 11 aa, HIV-1
AVHVASGYIEA

SEQ ID NO: 1616 - protein, 11 aa, HIV-1
HVASGYIEAEV

SEQ ID NO: 1617 - protein, 11 aa, HIV-1
IPAETGQETAY

SEQ ID NO: 1618 - protein, 11 aa, HIV-1
AETGQETAYFL

SEQ ID NO: 1619 - protein, 11 aa, HIV-1
ETGQETAYFLL

SEQ ID NO: 1620 - protein, 11 aa, HIV-1
TGQETAYFLLK

SEQ ID NO: 1621 - protein, 11 aa, HIV-1
GQETAYFLLKL

SEQ ID NO: 1622 - protein, 11 aa, HIV-1
TAYFLLKLAGR

SEQ ID NO: 1623 - protein, 11 aa, HIV-1
AYFLLKLAGRW

SEQ ID NO: 1624 - protein, 11 aa, HIV-1
FLLKLAGRWPV

SEQ ID NO: 1625 - protein, 11 aa, HIV-1
LLKLAGRWPVK

SEQ ID NO: 1626 - protein, 11 aa, HIV-1
KLAGRWPVKTI

SEQ ID NO: 1627 - protein, 11 aa, HIV-1
KTIHTDNGSNF

SEQ ID NO: 1628 - protein, 11 aa, HIV-1
HTDNGSNFTGA

SEQ ID NO: 1629 - protein, 11 aa, HIV-1
NGSNFTGATVR

SEQ ID NO: 1630 - protein, 11 aa, HIV-1
FTGATVRAACW

SEQ ID NO: 1631 - protein, 11 aa, HIV-1
TGATVRAACWW

SEQ ID NO: 1632 - protein, 11 aa, HIV-1
TVRAACWWAGI

SEQ ID NO: 1633 - protein, 11 aa, HIV-1
ACWWAGIKQEF

SEQ ID NO: 1634 - protein, 11 aa, HIV-1
WWAGIKQEFGI

SEQ ID NO: 1635 - protein, 11 aa, HIV-1
QEFGIPYNPQS

SEQ ID NO: 1636 - protein, 11 aa, HIV-1
GIPYNPQSQGV

SEQ ID NO: 1637 - protein, 11 aa, HIV-1
IPYNPQSQGVV

SEQ ID NO: 1638 - protein, 11 aa, HIV-1
NPQSQGVVESM

SEQ ID NO: 1639 - protein, 11 aa, HIV-1
QSQGVVESMNK

SEQ ID NO: 1640 - protein, 11 aa, HIV-1
GVVESMNKELK

SEQ ID NO: 1641 - protein, 11 aa, HIV-1
VVESMNKELKK

SEQ ID NO: 1642 - protein, 11 aa, HIV-1
KELKKIIGQVR

SEQ ID NO: 1643 - protein, 11 aa, HIV-1
GQVRDQAEHLK

SEQ ID NO: 1644 - protein, 11 aa, HIV-1
AEHLKTAVQMA

SEQ ID NO: 1645 - protein, 11 aa, HIV-1
HLKTAVQMAVF

SEQ ID NO: 1646 - protein, 11 aa, HIV-1
AVQMAVFIHNF

SEQ ID NO: 1647 - protein, 11 aa, HIV-1
VQMAVFIHNFK

SEQ ID NO: 1648 - protein, 11 aa, HIV-1
QMAVFIHNFKR

SEQ ID NO: 1649 - protein, 11 aa, HIV-1
MAVFIHNFKRK

SEQ ID NO: 1650 - protein, 11 aa, HIV-1
FIHNFKRKGGI

SEQ ID NO: 1651 - protein, 11 aa, HIV-1
GIGGYSAGERI

SEQ ID NO: 1652 - protein, 11 aa, HIV-1
GYSAGERIVDI

SEQ ID NO: 1653 - protein, 11 aa, HIV-1
YSAGERIVDII

SEQ ID NO: 1654 - protein, 11 aa, HIV-1
IIATDIQTKEL

SEQ ID NO: 1655 - protein, 11 aa, HIV-1
ATDIQTKELQK

SEQ ID NO: 1656 - protein, 11 aa, HIV-1
QTKELQKQITK

SEQ ID NO: 1657 - protein, 11 aa, HIV-1
LQKQITKIQNF

SEQ ID NO: 1658 - protein, 11 aa, HIV-1
KQITKIQNFRV

SEQ ID NO: 1659 - protein, 11 aa, HIV-1
QITKIQNFRVY

SEQ ID NO: 1660 - protein, 11 aa, HIV-1
ITKIQNFRVYY

SEQ ID NO: 1661 - protein, 11 aa, HIV-1
TKIQNFRVYYR

SEQ ID NO: 1662 - protein, 11 aa, HIV-1
QNFRVYYRDSR

SEQ ID NO: 1663 - protein, 11 aa, HIV-1
RVYYRDSRNPL

SEQ ID NO: 1664 - protein, 11 aa, HIV-1
VYYRDSRNPLW

SEQ ID NO: 1665 - protein, 11 aa, HIV-1
YYRDSRNPLWK

SEQ ID NO: 1666 - protein, 11 aa, HIV-1
SRNPLWKGPAK

SEQ ID NO: 1667 - protein, 11 aa, HIV-1
NPLWKGPAKLL

SEQ ID NO: 1668 - protein, 11 aa, HIV-1
KLLWKGEGAVV

SEQ ID NO: 1669 - protein, 11 aa, HIV-1
LLWKGEGAVVI

SEQ ID NO: 1670 - protein, 11 aa, HIV-1
AVVIQDNSDIK

SEQ ID NO: 1671 - protein, 11 aa, HIV-1
VVIQDNSDIKV

SEQ ID NO: 1672 - protein, 11 aa, HIV-1
VIQDNSDIKVV

SEQ ID NO: 1673 - protein, 11 aa, HIV-1
DNSDIKVVPRR

SEQ ID NO: 1674 - protein, 11 aa, HIV-1
DIKVVPRRKAK

SEQ ID NO: 1675 - protein, 11 aa, HIV-1
VVPRRKAKIIR

SEQ ID NO: 1676 - protein, 11 aa, HIV-1
KQMAGDDCVAS

SEQ ID NO: 1677 - protein, 11 aa, HIV-1
QMAGDDCVASR

SEQ ID NO: 1678 - protein, 15 aa, HIV-1
ADDTVLEEMSLPGRW

SEQ ID NO: 1679 - protein, 9 aa, HIV-1
LEEMSLPGR

SEQ ID NO: 1680 - protein, 15 aa, HIV-1
AEAMSQVTNSATIMM

SEQ ID NO: 1681 - protein, 9 aa, HIV-1
AMSQVTNSA

SEQ ID NO: 1682 - protein, 15 aa, HIV-1
AEAMSQVTNSATIMM

SEQ ID NO: 1683 - protein, 9 aa, HIV-1
MSQVTNSAT

SEQ ID NO: 1684 - protein, 15 aa, HIV-1
AEAMSQVTNSATIMM

SEQ ID NO: 1685 - protein, 9 aa, HIV-1
QVTNSATIM

SEQ ID NO: 1686 - protein, 15 aa, HIV-1
AEHLKTAVQMAVFIH

SEQ ID NO: 1687 - protein, 9 aa, HIV-1
LKTAVQMAV

SEQ ID NO: 1688 - protein, 15 aa, HIV-1
AENREILKEPVHGVY

SEQ ID NO: 1689 - protein, 9 aa, HIV-1
ILKEPVHGV

SEQ ID NO: 1690 - protein, 15 aa, HIV-1
AETFYVDGAANRETK

SEQ ID NO: 1691 - protein, 9 aa, HIV-1
YVDGAANRE

SEQ ID NO: 1692 - protein, 15 aa, HIV-1
AFLQGKAREFSSEQT

SEQ ID NO: 1693 - protein, 9 aa, HIV-1
LQGKAREFS

SEQ ID NO: 1694 - protein, 15 aa, HIV-1
AFSPEVIPMFSALSE

SEQ ID NO: 1695 - protein, 9 aa, HIV-1
VIPMFSALS

SEQ ID NO: 1696 - protein, 15 aa, HIV-1
AFTIPSINNETPGIR

SEQ ID NO: 1697 - protein, 9 aa, HIV-1
IPSINNETP

SEQ ID NO: 1698 - protein, 15 aa, HIV-1
AFTIPSINNETPGIR

SEQ ID NO: 1699 - protein, 9 aa, HIV-1
PSINNETPG

SEQ ID NO: 1700 - protein, 15 aa, HIV-1
AGERIVDIIATDIQT

SEQ ID NO: 1701 - protein, 9 aa, HIV-1
IVDIIATDI

SEQ ID NO: 1702 - protein, 15 aa, HIV-1
AGIKQEFGIPYNPQS

SEQ ID NO: 1703 - protein, 9 aa, HIV-1
IKQEFGIPY

SEQ ID NO: 1704 - protein, 15 aa, HIV-1
AGLKKKKSVTVLDVG

SEQ ID NO: 1705 - protein, 9 aa, HIV-1
LKKKKSVTV

SEQ ID NO: 1706 - protein, 15 aa, HIV-1
AGPIAPGQMREPRGS

SEQ ID NO: 1707 - protein, 9 aa, HIV-1
IAPGQMREP

SEQ ID NO: 1708 - protein, 15 aa, HIV-1
AGRWPVKTIHTDNGS

SEQ ID NO: 1709 - protein, 9 aa, HIV-1
VKTIHTDNG

SEQ ID NO: 1710 - protein, 15 aa, HIV-1
AGYVTNRGRQKVVTL

SEQ ID NO: 1711 - protein, 9 aa, HIV-1
VTNRGRQKV

SEQ ID NO: 1712 - protein, 15 aa, HIV-1
AGYVTNRGRQKVVTL

SEQ ID NO: 1713 - protein, 9 aa, HIV-1
YVTNRGRQK

SEQ ID NO: 1714 - protein, 15 aa, HIV-1
AIFQSSMTKILEPFR

SEQ ID NO: 1715 - protein, 9 aa, HIV-1
FQSSMTKIL

SEQ ID NO: 1716 - protein, 15 aa, HIV-1
AIGTVLVGPTPVNII

SEQ ID NO: 1717 - protein, 9 aa, HIV-1
IGTVLVGPT

SEQ ID NO: 1718 - protein, 15 aa, HIV-1
AIGTVLVGPTPVNII

SEQ ID NO: 1719 - protein, 9 aa, HIV-1
LVGPTPVNI

SEQ ID NO: 1720 - protein, 15 aa, HIV-1
AIGTVLVGPTPVNII

SEQ ID NO: 1721 - protein, 9 aa, HIV-1
VLVGPTPVN

SEQ ID NO: 1722 - protein, 15 aa, HIV-1
AISPRTLNAWVKVVE

SEQ ID NO: 1723 - protein, 9 aa, HIV-1
PRTLNAWVK

SEQ ID NO: 1724 - protein, 15 aa, HIV-1
AISPRTLNAWVKVVE

SEQ ID NO: 1725 - protein, 9 aa, HIV-1
TLNAWVKVV

SEQ ID NO: 1726 - protein, 15 aa, HIV-1
AIYLALQDSGLEVNI

SEQ ID NO: 1727 - protein, 9 aa, HIV-1
YLALQDSGL

SEQ ID NO: 1728 - protein, 15 aa, HIV-1
AKLLWKGEGAVVIQD

SEQ ID NO: 1729 - protein, 9 aa, HIV-1
WKGEGAVVI

SEQ ID NO: 1730 - protein, 15 aa, HIV-1
ALGIIQAQPDQSESE

SEQ ID NO: 1731 - protein, 9 aa, HIV-1
IIQAQPDQS

SEQ ID NO: 1732 - protein, 15 aa, HIV-1
ALGIIQAQPDQSESE

SEQ ID NO: 1733 - protein, 9 aa, HIV-1
IQAQPDQSE

SEQ ID NO: 1734 - protein, 15 aa, HIV-1
AMASDFNLPPVVAKE

SEQ ID NO: 1735 - protein, 9 aa, HIV-1
DFNLPPVVA

SEQ ID NO: 1736 - protein, 15 aa, HIV-1
AMASDFNLPPVVAKE

SEQ ID NO: 1737 - protein, 9 aa, HIV-1
MASDFNLPP

SEQ ID NO: 1738 - protein, 15 aa, HIV-1
AMSQVTNSATIMMQR

SEQ ID NO: 1739 - protein, 9 aa, HIV-1
AMSQVTNSA

SEQ ID NO: 1740 - protein, 15 aa, HIV-1
AMSQVTNSATIMMQR

SEQ ID NO: 1741 - protein, 9 aa, HIV-1
VTNSATIMM

SEQ ID NO: 1742 - protein, 15 aa, HIV-1
AREFSSEQTRANSPT

SEQ ID NO: 1743 - protein, 9 aa, HIV-1
FSSEQTRAN

SEQ ID NO: 1744 - protein, 15 aa, HIV-1
ARMRGAHTNDVKQLT

SEQ ID NO: 1745 - protein, 9 aa, HIV-1
MRGAHTNDV

SEQ ID NO: 1746 - protein, 15 aa, HIV-1
ARVLAEAMSQVTNSA

SEQ ID NO: 1747 - protein, 9 aa, HIV-1
LAEAMSQVT

SEQ ID NO: 1748 - protein, 15 aa, HIV-1
ARVLAEAMSQVTNSA

SEQ ID NO: 1749 - protein, 9 aa, HIV-1
VLAEAMSQV

SEQ ID NO: 1750 - protein, 15 aa, HIV-1
ASDFNLPPVVAKEIV

SEQ ID NO: 1751 - protein, 9 aa, HIV-1
DFNLPPVVA

SEQ ID NO: 1752 - protein, 15 aa, HIV-1
ASQEVKNWMTETLLV

SEQ ID NO: 1753 - protein, 9 aa, HIV-1
VKNWMTETL

SEQ ID NO: 1754 - protein, 15 aa, HIV-1
ASQIYPGIKVRQLCK

SEQ ID NO: 1755 - protein, 9 aa, HIV-1
YPGIKVRQL

SEQ ID NO: 1756 - protein, 15 aa, HIV-1
ASRELERFAVNPGLL

SEQ ID NO: 1757 - protein, 9 aa, HIV-1
LERFAVNPG

SEQ ID NO: 1758 - protein, 15 aa, HIV-1
ATDIQTKELQKQITK

SEQ ID NO: 1759 - protein, 9 aa, HIV-1
IQTKELQKQ

SEQ ID NO: 1760 - protein, 15 aa, HIV-1
ATIMMQRGNFRNQRK

SEQ ID NO: 1761 - protein, 9 aa, HIV-1
IMMQRGNFR

SEQ ID NO: 1762 - protein, 15 aa, HIV-1
ATLEEMMTACQGVGG

SEQ ID NO: 1763 - protein, 9 aa, HIV-1
LEEMMTACQ

SEQ ID NO: 1764 - protein, 15 aa, HIV-1
ATPQDLNTMLNTVGG

SEQ ID NO: 1765 - protein, 9 aa, HIV-1
LNTMLNTVG

SEQ ID NO: 1766 - protein, 15 aa, HIV-1
ATVRAACWWAGIKQE

SEQ ID NO: 1767 - protein, 9 aa, HIV-1
VRAACWWAG

SEQ ID NO: 1768 - protein, 15 aa, HIV-1
ATWIPEWEFVNTPPL

SEQ ID NO: 1769 - protein, 9 aa, HIV-1
ATWIPEWEF

SEQ ID NO: 1770 - protein, 15 aa, HIV-1
ATWIPEWEFVNTPPL

SEQ ID NO: 1771 - protein, 9 aa, HIV-1
PEWEFVNTP

SEQ ID NO: 1772 - protein, 15 aa, HIV-1
AVFIHNFKRKGGIGG

SEQ ID NO: 1773 - protein, 9 aa, HIV-1
FIHNFKRKG

SEQ ID NO: 1774 - protein, 15 aa, HIV-1
AVFIHNFKRKGGIGG

SEQ ID NO: 1775 - protein, 9 aa, HIV-1
IHNFKRKGG

SEQ ID NO: 1776 - protein, 15 aa, HIV-1
AVQKITTESIVIWGK

SEQ ID NO: 1777 - protein, 9 aa, HIV-1
VQKITTESI

SEQ ID NO: 1778 - protein, 15 aa, HIV-1
AVQMAVFIHNFKRKG

SEQ ID NO: 1779 - protein, 9 aa, HIV-1
VQMAVFIHN

SEQ ID NO: 1780 - protein, 15 aa, HIV-1
AYFLLKLAGRWPVKT

SEQ ID NO: 1781 - protein, 9 aa, HIV-1
LKLAGRWPV

SEQ ID NO: 1782 - protein, 15 aa, HIV-1
AYFLLKLAGRWPVKT

SEQ ID NO: 1783 - protein, 9 aa, HIV-1
LLKLAGRWP

SEQ ID NO: 1784 - protein, 15 aa, HIV-1
AYFLLKLAGRWPVKT

SEQ ID NO: 1785 - protein, 9 aa, HIV-1
YFLLKLAGR

SEQ ID NO: 1786 - protein, 15 aa, HIV-1
CDKCQLKGEAMHGQV

SEQ ID NO: 1787 - protein, 9 aa, HIV-1
LKGEAMHGQ

SEQ ID NO: 1788 - protein, 15 aa, HIV-1
CGHKAIGTVLVGPTP

SEQ ID NO: 1789 - protein, 9 aa, HIV-1
HKAIGTVLV

SEQ ID NO: 1790 - protein, 15 aa, HIV-1
CGHKAIGTVLVGPTP

SEQ ID NO: 1791 - protein, 9 aa, HIV-1
IGTVLVGPT

SEQ ID NO: 1792 - protein, 15 aa, HIV-1
CKLLRGTKALTEVIP

SEQ ID NO: 1793 - protein, 9 aa, HIV-1
LRGTKALTE

SEQ ID NO: 1794 - protein, 15 aa, HIV-1
CKTILKALGPAATLE

SEQ ID NO: 1795 - protein, 9 aa, HIV-1
ILKALGPAA

SEQ ID NO: 1796 - protein, 15 aa, HIV-1
CKTILKALGPAATLE

SEQ ID NO: 1797 - protein, 9 aa, HIV-1
LKALGPAAT

SEQ ID NO: 1798 - protein, 15 aa, HIV-1
CQLKGEAMHGQVDCS

SEQ ID NO: 1799 - protein, 9 aa, HIV-1
LKGEAMHGQ

SEQ ID NO: 1800 - protein, 15 aa, HIV-1
CRQILGQLQPSLQTG

SEQ ID NO: 1801 - protein, 9 aa, HIV-1
GQLQPSLQT

SEQ ID NO: 1802 - protein, 15 aa, HIV-1
CRQILGQLQPSLQTG

SEQ ID NO: 1803 - protein, 9 aa, HIV-1
LGQLQPSLQ

SEQ ID NO: 1804 - protein, 15 aa, HIV-1
CTHLEGKVILVAVHV

SEQ ID NO: 1805 - protein, 9 aa, HIV-1
LEGKVILVA

SEQ ID NO: 1806 - protein, 15 aa, HIV-1
CTLNFPISPIETVPV

SEQ ID NO: 1807 - protein, 9 aa, HIV-1
FPISPIETV

SEQ ID NO: 1808 - protein, 15 aa, HIV-1
DAYFSVPLDEDFRKY

SEQ ID NO: 1809 - protein, 9 aa, HIV-1
YFSVPLDED

SEQ ID NO: 1810 - protein, 15 aa, HIV-1
DCKTILKALGPAATL

SEQ ID NO: 1811 - protein, 9 aa, HIV-1
ILKALGPAA

SEQ ID NO: 1812 - protein, 15 aa, HIV-1
DCKTILKALGPAATL

SEQ ID NO: 1813 - protein, 9 aa, HIV-1
LKALGPAAT

SEQ ID NO: 1814 - protein, 15 aa, HIV-1
DDLYVGSDLEIGQHR

SEQ ID NO: 1815 - protein, 9 aa, HIV-1
YVGSDLEIG

SEQ ID NO: 1816 - protein, 15 aa, HIV-1
DDTVLEEMSLPGRWK

SEQ ID NO: 1817 - protein, 9 aa, HIV-1
LEEMSLPGR

SEQ ID NO: 1818 - protein, 15 aa, HIV-1
DEDFRKYTAFTIPSI

SEQ ID NO: 1819 - protein, 9 aa, HIV-1
FRKYTAFTI

SEQ ID NO: 1820 - protein, 15 aa, HIV-1
DEDFRKYTAFTIPSI

SEQ ID NO: 1821 - protein, 9 aa, HIV-1
KYTAFTIPS

SEQ ID NO: 1822 - protein, 15 aa, HIV-1
DEHEKYHSNWRAMAS

SEQ ID NO: 1823 - protein, 9 aa, HIV-1
EKYHSNWRA

SEQ ID NO: 1824 - protein, 15 aa, HIV-1
DEHEKYHSNWRAMAS

SEQ ID NO: 1825 - protein, 9 aa, HIV-1
YHSNWRAMA

SEQ ID NO: 1826 - protein, 15 aa, HIV-1
DFNLPPVVAKEIVAS

SEQ ID NO: 1827 - protein, 9 aa, HIV-1
DFNLPPVVA

SEQ ID NO: 1828 - protein, 15 aa, HIV-1
DFRKYTAFTIPSINN

SEQ ID NO: 1829 - protein, 9 aa, HIV-1
FRKYTAFTI

SEQ ID NO: 1830 - protein, 15 aa, HIV-1
DFRKYTAFTIPSINN

SEQ ID NO: 1831 - protein, 9 aa, HIV-1
YTAFTIPSI

SEQ ID NO: 1832 - protein, 15 aa, HIV-1
DFWEVQLGIPHPAGL

SEQ ID NO: 1833 - protein, 9 aa, HIV-1
VQLGIPHPA

SEQ ID NO: 1834 - protein, 15 aa, HIV-1
DGPKVKQWPLTEEKI

SEQ ID NO: 1835 - protein, 9 aa, HIV-1
VKQWPLTEE

SEQ ID NO: 1836 - protein, 15 aa, HIV-1
DIAGTTSTLQEQIGW

SEQ ID NO: 1837 - protein, 9 aa, HIV-1
IAGTTSTLQ

SEQ ID NO: 1838 - protein, 15 aa, HIV-1
DIIATDIQTKELQKQ

SEQ ID NO: 1839 - protein, 9 aa, HIV-1
ATDIQTKEL

SEQ ID NO: 1840 - protein, 15 aa, HIV-1
DIKVVPRRKAKIIRD

SEQ ID NO: 1841 - protein, 9 aa, HIV-1
IKVVPRRKA

SEQ ID NO: 1842 - protein, 15 aa, HIV-1
DIQKLVGKLNWASQI

SEQ ID NO: 1843 - protein, 9 aa, HIV-1
LVGKLNWAS

SEQ ID NO: 1844 - protein, 15 aa, HIV-1
DIQTKELQKQITKIQ

SEQ ID NO: 1845 - protein, 9 aa, HIV-1
IQTKELQKQ

SEQ ID NO: 1846 - protein, 15 aa, HIV-1
DIVIYQYMDDLYVGS

SEQ ID NO: 1847 - protein, 9 aa, HIV-1
YQYMDDLYV

SEQ ID NO: 1848 - protein, 15 aa, HIV-1
DKCQLKGEAMHGQVD

SEQ ID NO: 1849 - protein, 9 aa, HIV-1
LKGEAMHGQ

SEQ ID NO: 1850 - protein, 15 aa, HIV-1
DKLVSAGIRKVLFLD

SEQ ID NO: 1851 - protein, 9 aa, HIV-1
LVSAGIRKV

SEQ ID NO: 1852 - protein, 15 aa, HIV-1
DKWTVQPIVLPEKDS

SEQ ID NO: 1853 - protein, 9 aa, HIV-1
WTVQPIVLP

SEQ ID NO: 1854 - protein, 15 aa, HIV-1
DLAFLQGKAREFSSE

SEQ ID NO: 1855 - protein, 9 aa, HIV-1
FLQGKAREF

SEQ ID NO: 1856 - protein, 15 aa, HIV-1
DLNTMLNTVGGHQAA

SEQ ID NO: 1857 - protein, 9 aa, HIV-1
LNTMLNTVG

SEQ ID NO: 1858 - protein, 15 aa, HIV-1
DLNTMLNTVGGHQAA

SEQ ID NO: 1859 - protein, 9 aa, HIV-1
MLNTVGGHQ

SEQ ID NO: 1860 - protein, 15 aa, HIV-1
DLYVGSDLEIGQHRT

SEQ ID NO: 1861 - protein, 9 aa, HIV-1
YVGSDLEIG

SEQ ID NO: 1862 - protein, 15 aa, HIV-1
DNGSNFTGATVRAAC

SEQ ID NO: 1863 - protein, 9 aa, HIV-1
FTGATVRAA

SEQ ID NO: 1864 - protein, 15 aa, HIV-1
DNSDIKVVPRRKAKI

SEQ ID NO: 1865 - protein, 9 aa, HIV-1
IKVVPRRKA

SEQ ID NO: 1866 - protein, 15 aa, HIV-1
DQAEHLKTAVQMAVF

SEQ ID NO: 1867 - protein, 9 aa, HIV-1
LKTAVQMAV

SEQ ID NO: 1868 - protein, 15 aa, HIV-1
DQILIEICGHKAIGT

SEQ ID NO: 1869 - protein, 9 aa, HIV-1
LIEICGHKA

SEQ ID NO: 1870 - protein, 15 aa, HIV-1
DRFYKTLRAEQASQE

SEQ ID NO: 1871 - protein, 9 aa, HIV-1
DRFYKTLRA

SEQ ID NO: 1872 - protein, 15 aa, HIV-1
DRFYKTLRAEQASQE

SEQ ID NO: 1873 - protein, 9 aa, HIV-1
FYKTLRAEQ

SEQ ID NO: 1874 - protein, 15 aa, HIV-1
DRFYKTLRAEQASQE

SEQ ID NO: 1875 - protein, 9 aa, HIV-1
YKTLRAEQA

SEQ ID NO: 1876 - protein, 15 aa, HIV-1
DRVHPVHAGPIAPGQ

SEQ ID NO: 1877 - protein, 9 aa, HIV-1
VHAGPIAPG

SEQ ID NO: 1878 - protein, 15 aa, HIV-1
DSGLEVNIVTDSQYA

SEQ ID NO: 1879 - protein, 9 aa, HIV-1
LEVNIVTDS

SEQ ID NO: 1880 - protein, 15 aa, HIV-1
DSQYALGIIQAQPDQ

SEQ ID NO: 1881 - protein, 9 aa, HIV-1
YALGIIQAQ

SEQ ID NO: 1882 - protein, 15 aa, HIV-1
DSRNPLWKGPAKLLW

SEQ ID NO: 1883 - protein, 9 aa, HIV-1
LWKGPAKLL

SEQ ID NO: 1884 - protein, 15 aa, HIV-1
DTVLEEMSLPGRWKP

SEQ ID NO: 1885 - protein, 9 aa, HIV-1
LEEMSLPGR

SEQ ID NO: 1886 - protein, 15 aa, HIV-1
DVGDAYFSVPLDEDF

SEQ ID NO: 1887 - protein, 9 aa, HIV-1
YFSVPLDED

SEQ ID NO: 1888 - protein, 15 aa, HIV-1
DYVDRFYKTLRAEQA

SEQ ID NO: 1889 - protein, 9 aa, HIV-1
DRFYKTLRA

SEQ ID NO: 1890 - protein, 15 aa, HIV-1
DYVDRFYKTLRAEQA

SEQ ID NO: 1891 - protein, 9 aa, HIV-1
FYKTLRAEQ

SEQ ID NO: 1892 - protein, 15 aa, HIV-1
DYVDRFYKTLRAEQA

SEQ ID NO: 1893 - protein, 9 aa, HIV-1
VDRFYKTLR

SEQ ID NO: 1894 - protein, 15 aa, HIV-1
DYVDRFYKTLRAEQA

SEQ ID NO: 1895 - protein, 9 aa, HIV-1
YVDRFYKTL

SEQ ID NO: 1896 - protein, 15 aa, HIV-1
EAMSQVTNSATIMMQ

SEQ ID NO: 1897 - protein, 9 aa, HIV-1
AMSQVTNSA

SEQ ID NO: 1898 - protein, 15 aa, HIV-1
EAMSQVTNSATIMMQ

SEQ ID NO: 1899 - protein, 9 aa, HIV-1
VTNSATIMM

SEQ ID NO: 1900 - protein, 15 aa, HIV-1
EAVQKITTESIVIWG

SEQ ID NO: 1901 - protein, 9 aa, HIV-1
VQKITTESI

SEQ ID NO: 1902 - protein, 15 aa, HIV-1
EDFRKYTAFTIPSIN

SEQ ID NO: 1903 - protein, 9 aa, HIV-1
FRKYTAFTI

SEQ ID NO: 1904 - protein, 15 aa, HIV-1
EDFRKYTAFTIPSIN

SEQ ID NO: 1905 - protein, 9 aa, HIV-1
YTAFTIPSI

SEQ ID NO: 1906 - protein, 15 aa, HIV-1
EDLAFLQGKAREFSS

SEQ ID NO: 1907 - protein, 9 aa, HIV-1
FLQGKAREF

SEQ ID NO: 1908 - protein, 15 aa, HIV-1
EDLAFLQGKAREFSS

SEQ ID NO: 1909 - protein, 9 aa, HIV-1
LAFLQGKAR

SEQ ID NO: 1910 - protein, 15 aa, HIV-1
EEKIKALVEICTEME

SEQ ID NO: 1911 - protein, 9 aa, HIV-1
IKALVEICT

SEQ ID NO: 1912 - protein, 15 aa, HIV-1
EELRQHLLRWGLTTP

SEQ ID NO: 1913 - protein, 9 aa, HIV-1
LRQHLLRWG

SEQ ID NO: 1914 - protein, 15 aa, HIV-1
EELRSLYNTVATLYC

SEQ ID NO: 1915 - protein, 9 aa, HIV-1
LRSLYNTVA

SEQ ID NO: 1916 - protein, 15 aa, HIV-1
EELRSLYNTVATLYC

SEQ ID NO: 1917 - protein, 9 aa, HIV-1
LYNTVATLY

SEQ ID NO: 1918 - protein, 15 aa, HIV-1
EFGIPYNPQSQGVVE

SEQ ID NO: 1919 - protein, 9 aa, HIV-1
PYNPQSQGV

SEQ ID NO: 1920 - protein, 15 aa, HIV-1
EFSSEQTRANSPTRR

SEQ ID NO: 1921 - protein, 9 aa, HIV-1
FSSEQTRAN

SEQ ID NO: 1922 - protein, 15 aa, HIV-1
EFSSEQTRANSPTRR

SEQ ID NO: 1923 - protein, 9 aa, HIV-1
QTRANSPTR

SEQ ID NO: 1924 - protein, 15 aa, HIV-1
EFVNTPPLVKLWYQL

SEQ ID NO: 1925 - protein, 9 aa, HIV-1
FVNTPPLVK

SEQ ID NO: 1926 - protein, 15 aa, HIV-1
EFVNTPPLVKLWYQL

SEQ ID NO: 1927 - protein, 9 aa, HIV-1
VNTPPLVKL

SEQ ID NO: 1928 - protein, 15 aa, HIV-1
EGCRQILGQLQPSLQ

SEQ ID NO: 1929 - protein, 9 aa, HIV-1
CRQILGQLQ

SEQ ID NO: 1930 - protein, 15 aa, HIV-1
EGCRQILGQLQPSLQ

SEQ ID NO: 1931 - protein, 9 aa, HIV-1
ILGQLQPSL

SEQ ID NO: 1932 - protein, 15 aa, HIV-1
EGCRQILGQLQPSLQ

SEQ ID NO: 1933 - protein, 9 aa, HIV-1
RQILGQLQP

SEQ ID NO: 1934 - protein, 15 aa, HIV-1
EGKISKIGPENPYNT

SEQ ID NO: 1935 - protein, 9 aa, HIV-1
ISKIGPENP

SEQ ID NO: 1936 - protein, 15 aa, HIV-1
EGKVILVAVHVASGY

SEQ ID NO: 1937 - protein, 9 aa, HIV-1
LVAVHVASG

SEQ ID NO: 1938 - protein, 15 aa, HIV-1
EGKVILVAVHVASGY

SEQ ID NO: 1939 - protein, 9 aa, HIV-1
VILVAVHVA

SEQ ID NO: 1940 - protein, 15 aa, HIV-1
EHEKYHSNWRAMASD

SEQ ID NO: 1941 - protein, 9 aa, HIV-1
HSNWRAMAS

SEQ ID NO: 1942 - protein, 15 aa, HIV-1
EHEKYHSNWRAMASD

SEQ ID NO: 1943 - protein, 9 aa, HIV-1
YHSNWRAMA

SEQ ID NO: 1944 - protein, 15 aa, HIV-1
EHLKTAVQMAVFIHN

SEQ ID NO: 1945 - protein, 9 aa, HIV-1
LKTAVQMAV

SEQ ID NO: 1946 - protein, 15 aa, HIV-1
EICGHKAIGTVLVGP

SEQ ID NO: 1947 - protein, 9 aa, HIV-1
HKAIGTVLV

SEQ ID NO: 1948 - protein, 15 aa, HIV-1
EIYKRWIILGLNKIV

SEQ ID NO: 1949 - protein, 9 aa, HIV-1
WIILGLNKI

SEQ ID NO: 1950 - protein, 15 aa, HIV-1
EIYKRWIILGLNKIV

SEQ ID NO: 1951 - protein, 9 aa, HIV-1
YKRWIILGL

SEQ ID NO: 1952 - protein, 15 aa, HIV-1
EKEPIVGAETFYVDG

SEQ ID NO: 1953 - protein, 9 aa, HIV-1
IVGAETFYV

SEQ ID NO: 1954 - protein, 15 aa, HIV-1
EKIKALVEICTEMEK

SEQ ID NO: 1955 - protein, 9 aa, HIV-1
IKALVEICT

SEQ ID NO: 1956 - protein, 15 aa, HIV-1
EKVYLAWVPAHKGIG

SEQ ID NO: 1957 - protein, 9 aa, HIV-1
LAWVPAHKG

SEQ ID NO: 1958 - protein, 15 aa, HIV-1
EKVYLAWVPAHKGIG

SEQ ID NO: 1959 - protein, 9 aa, HIV-1
VYLAWVPAH

SEQ ID NO: 1960 - protein, 15 aa, HIV-1
EKVYLAWVPAHKGIG

SEQ ID NO: 1961 - protein, 9 aa, HIV-1
YLAWVPAHK

SEQ ID NO: 1962 - protein, 15 aa, HIV-1
EKYHSNWRAMASDFN

SEQ ID NO: 1963 - protein, 9 aa, HIV-1
HSNWRAMAS

SEQ ID NO: 1964 - protein, 15 aa, HIV-1
EKYHSNWRAMASDFN

SEQ ID NO: 1965 - protein, 9 aa, HIV-1
YHSNWRAMA

SEQ ID NO: 1966 - protein, 15 aa, HIV-1
ELERFAVNPGLLETS

SEQ ID NO: 1967 - protein, 9 aa, HIV-1
FAVNPGLLE

SEQ ID NO: 1968 - protein, 15 aa, HIV-1
ELHPDKWTVQPIVLP

SEQ ID NO: 1969 - protein, 9 aa, HIV-1
DKWTVQPIV

SEQ ID NO: 1970 - protein, 15 aa, HIV-1
ELHPDKWTVQPIVLP

SEQ ID NO: 1971 - protein, 9 aa, HIV-1
KWTVQPIVL

SEQ ID NO: 1972 - protein, 15 aa, HIV-1
ELQAIYLALQDSGLE

SEQ ID NO: 1973 - protein, 9 aa, HIV-1
LQAIYLALQ

SEQ ID NO: 1974 - protein, 15 aa, HIV-1
ELQKQITKIQNFRVY

SEQ ID NO: 1975 - protein, 9 aa, HIV-1
ITKIQNFRV

SEQ ID NO: 1976 - protein, 15 aa, HIV-1
ELQKQITKIQNFRVY

SEQ ID NO: 1977 - protein, 9 aa, HIV-1
LQKQITKIQ

SEQ ID NO: 1978 - protein, 15 aa, HIV-1
ELRQHLLRWGLTTPD

SEQ ID NO: 1979 - protein, 9 aa, HIV-1
LLRWGLTTP

SEQ ID NO: 1980 - protein, 15 aa, HIV-1
ELRQHLLRWGLTTPD

SEQ ID NO: 1981 - protein, 9 aa, HIV-1
LRQHLLRWG

SEQ ID NO: 1982 - protein, 15 aa, HIV-1
ELRSLYNTVATLYCV

SEQ ID NO: 1983 - protein, 9 aa, HIV-1
LYNTVATLY

SEQ ID NO: 1984 - protein, 15 aa, HIV-1
ELRSLYNTVATLYCV

SEQ ID NO: 1985 - protein, 9 aa, HIV-1
YNTVATLYC

SEQ ID NO: 1986 - protein, 15 aa, HIV-1
ELVNQIIEQLIKKEK

SEQ ID NO: 1987 - protein, 9 aa, HIV-1
VNQIIEQLI

SEQ ID NO: 1988 - protein, 15 aa, HIV-1
ENREILKEPVHGVYY

SEQ ID NO: 1989 - protein, 9 aa, HIV-1
ILKEPVHGV

SEQ ID NO: 1990 - protein, 15 aa, HIV-1
EPFKNLKTGKYARMR

SEQ ID NO: 1991 - protein, 9 aa, HIV-1
FKNLKTGKY

SEQ ID NO: 1992 - protein, 15 aa, HIV-1
EPFKNLKTGKYARMR

SEQ ID NO: 1993 - protein, 9 aa, HIV-1
LKTGKYARM

SEQ ID NO: 1994 - protein, 15 aa, HIV-1
EPFRKQNPDIVIYQY

SEQ ID NO: 1995 - protein, 9 aa, HIV-1
FRKQNPDIV

SEQ ID NO: 1996 - protein, 15 aa, HIV-1
EPIVGAETFYVDGAA

SEQ ID NO: 1997 - protein, 9 aa, HIV-1
IVGAETFYV

SEQ ID NO: 1998 - protein, 15 aa, HIV-1
EPPFLWMGYELHPDK

SEQ ID NO: 1999 - protein, 9 aa, HIV-1
FLWMGYELH

SEQ ID NO: 2000 - protein, 15 aa, HIV-1
EPRGSDIAGTTSTLQ

SEQ ID NO: 2001 - protein, 9 aa, HIV-1
EPRGSDIAG

SEQ ID NO: 2002 - protein, 15 aa, HIV-1
EPRGSDIAGTTSTLQ

SEQ ID NO: 2003 - protein, 9 aa, HIV-1
GSDIAGTTS

SEQ ID NO: 2004 - protein, 15 aa, HIV-1
EPRGSDIAGTTSTLQ

SEQ ID NO: 2005 - protein, 9 aa, HIV-1
RGSDIAGTT

SEQ ID NO: 2006 - protein, 15 aa, HIV-1
EQASQEVKNWMTETL

SEQ ID NO: 2007 - protein, 9 aa, HIV-1
EVKNWMTET

SEQ ID NO: 2008 - protein, 15 aa, HIV-1
EQASQEVKNWMTETL

SEQ ID NO: 2009 - protein, 9 aa, HIV-1
SQEVKNWMT

SEQ ID NO: 2010 - protein, 15 aa, HIV-1
EQIGWMTNNPPIPVG

SEQ ID NO: 2011 - protein, 9 aa, HIV-1
IGWMTNNPP

SEQ ID NO: 2012 - protein, 15 aa, HIV-1
EQIGWMTNNPPIPVG

SEQ ID NO: 2013 - protein, 9 aa, HIV-1
MTNNPPIPV

SEQ ID NO: 2014 - protein, 15 aa, HIV-1
EQLIKKEKVYLAWVP

SEQ ID NO: 2015 - protein, 9 aa, HIV-1
IKKEKVYLA

SEQ ID NO: 2016 - protein, 15 aa, HIV-1
EQVDKLVSAGIRKVL

SEQ ID NO: 2017 - protein, 9 aa, HIV-1
LVSAGIRKV

SEQ ID NO: 2018 - protein, 15 aa, HIV-1
ERFAVNPGLLETSEG

SEQ ID NO: 2019 - protein, 9 aa, HIV-1
FAVNPGLLE

SEQ ID NO: 2020 - protein, 15 aa, HIV-1
ERFAVNPGLLETSEG

SEQ ID NO: 2021 - protein, 9 aa, HIV-1
VNPGLLETS

SEQ ID NO: 2022 - protein, 15 aa, HIV-1
ERIVDIIATDIQTKE

SEQ ID NO: 2023 - protein, 9 aa, HIV-1
IVDIIATDI

SEQ ID NO: 2024 - protein, 15 aa, HIV-1
ESELVNQIIEQLIKK

SEQ ID NO: 2025 - protein, 9 aa, HIV-1
LVNQIIEQL

SEQ ID NO: 2026 - protein, 15 aa, HIV-1
ESIVIWGKTPKFKLP

SEQ ID NO: 2027 - protein, 9 aa, HIV-1
IVIWGKTPK

SEQ ID NO: 2028 - protein, 15 aa, HIV-1
ESIVIWGKTPKFKLP

SEQ ID NO: 2029 - protein, 9 aa, HIV-1
IWGKTPKFK

SEQ ID NO: 2030 - protein, 15 aa, HIV-1
ESIVIWGKTPKFKLP

SEQ ID NO: 2031 - protein, 9 aa, HIV-1
VIWGKTPKF

SEQ ID NO: 2032 - protein, 15 aa, HIV-1
ESMNKELKKIIGQVR

SEQ ID NO: 2033 - protein, 9 aa, HIV-1
MNKELKKII

SEQ ID NO: 2034 - protein, 15 aa, HIV-1
ETAYFLLKLAGRWPV

SEQ ID NO: 2035 - protein, 9 aa, HIV-1
AYFLLKLAG

SEQ ID NO: 2036 - protein, 15 aa, HIV-1
ETAYFLLKLAGRWPV

SEQ ID NO: 2037 - protein, 9 aa, HIV-1
FLLKLAGRW

SEQ ID NO: 2038 - protein, 15 aa, HIV-1
ETAYFLLKLAGRWPV

SEQ ID NO: 2039 - protein, 9 aa, HIV-1
YFLLKLAGR

SEQ ID NO: 2040 - protein, 15 aa, HIV-1
ETFYVDGAANRETKL

SEQ ID NO: 2041 - protein, 9 aa, HIV-1
YVDGAANRE

SEQ ID NO: 2042 - protein, 15 aa, HIV-1
ETLLVQNANPDCKTI

SEQ ID NO: 2043 - protein, 9 aa, HIV-1
VQNANPDCK

SEQ ID NO: 2044 - protein, 15 aa, HIV-1
ETPGIRYQYNVLPQG

SEQ ID NO: 2045 - protein, 9 aa, HIV-1
IRYQYNVLP

SEQ ID NO: 2046 - protein, 15 aa, HIV-1
ETVPVKLKPGMDGPK

SEQ ID NO: 2047 - protein, 9 aa, HIV-1
VKLKPGMDG

SEQ ID NO: 2048 - protein, 15 aa, HIV-1
ETWETWWTEYWQATW

SEQ ID NO: 2049 - protein, 9 aa, HIV-1
WETWWTEYW

SEQ ID NO: 2050 - protein, 15 aa, HIV-1
ETWWTEYWQATWIPE

SEQ ID NO: 2051 - protein, 9 aa, HIV-1
EYWQATWIP

SEQ ID NO: 2052 - protein, 15 aa, HIV-1
ETWWTEYWQATWIPE

SEQ ID NO: 2053 - protein, 9 aa, HIV-1
WWTEYWQAT

SEQ ID NO: 2054 - protein, 15 aa, HIV-1
EVIPMFSALSEGATP

SEQ ID NO: 2055 - protein, 9 aa, HIV-1
IPMFSALSE

SEQ ID NO: 2056 - protein, 15 aa, HIV-1
EVIPMFSALSEGATP

SEQ ID NO: 2057 - protein, 9 aa, HIV-1
MFSALSEGA

SEQ ID NO: 2058 - protein, 15 aa, HIV-1
EVIPMFSALSEGATP

SEQ ID NO: 2059 - protein, 9 aa, HIV-1
VIPMFSALS

SEQ ID NO: 2060 - protein, 15 aa, HIV-1
EVKNWMTETLLVQNA

SEQ ID NO: 2061 - protein, 9 aa, HIV-1
NWMTETLLV

SEQ ID NO: 2062 - protein, 15 aa, HIV-1
EVKNWMTETLLVQNA

SEQ ID NO: 2063 - protein, 9 aa, HIV-1
WMTETLLVQ

SEQ ID NO: 2064 - protein, 15 aa, HIV-1
EVQLGIPHPAGLKKK

SEQ ID NO: 2065 - protein, 9 aa, HIV-1
VQLGIPHPA

SEQ ID NO: 2066 - protein, 15 aa, HIV-1
EWEFVNTPPLVKLWY

SEQ ID NO: 2067 - protein, 9 aa, HIV-1
FVNTPPLVK

SEQ ID NO: 2068 - protein, 15 aa, HIV-1
EWEFVNTPPLVKLWY

SEQ ID NO: 2069 - protein, 9 aa, HIV-1
VNTPPLVKL

SEQ ID NO: 2070 - protein, 15 aa, HIV-1
EWEFVNTPPLVKLWY

SEQ ID NO: 2071 - protein, 9 aa, HIV-1
WEFVNTPPL

SEQ ID NO: 2072 - protein, 15 aa, HIV-1
EYWQATWIPEWEFVN

SEQ ID NO: 2073 - protein, 9 aa, HIV-1
WQATWIPEW

SEQ ID NO: 2074 - protein, 15 aa, HIV-1
FAIKKKDSTKWRKLV

SEQ ID NO: 2075 - protein, 9 aa, HIV-1
IKKKDSTKW

SEQ ID NO: 2076 - protein, 15 aa, HIV-1
FAVNPGLLETSEGCR

SEQ ID NO: 2077 - protein, 9 aa, HIV-1
VNPGLLETS

SEQ ID NO: 2078 - protein, 15 aa, HIV-1
FGIPYNPQSQGVVES

SEQ ID NO: 2079 - protein, 9 aa, HIV-1
PYNPQSQGV

SEQ ID NO: 2080 - protein, 15 aa, HIV-1
FIHNFKRKGGIGGYS

SEQ ID NO: 2081 - protein, 9 aa, HIV-1
FKRKGGIGG

SEQ ID NO: 2082 - protein, 15 aa, HIV-1
FKNLKTGKYARMRGA

SEQ ID NO: 2083 - protein, 9 aa, HIV-1
FKNLKTGKY

SEQ ID NO: 2084 - protein, 15 aa, HIV-1
FKNLKTGKYARMRGA

SEQ ID NO: 2085 - protein, 9 aa, HIV-1
LKTGKYARM

SEQ ID NO: 2086 - protein, 15 aa, HIV-1
FKRKGGIGGYSAGER

SEQ ID NO: 2087 - protein, 9 aa, HIV-1
FKRKGGIGG

SEQ ID NO: 2088 - protein, 15 aa, HIV-1
FLLKLAGRWPVKTIH

SEQ ID NO: 2089 - protein, 9 aa, HIV-1
KLAGRWPVK

SEQ ID NO: 2090 - protein, 15 aa, HIV-1
FLLKLAGRWPVKTIH

SEQ ID NO: 2091 - protein, 9 aa, HIV-1
LAGRWPVKT

SEQ ID NO: 2092 - protein, 15 aa, HIV-1
FLLKLAGRWPVKTIH

SEQ ID NO: 2093 - protein, 9 aa, HIV-1
LKLAGRWPV

SEQ ID NO: 2094 - protein, 15 aa, HIV-1
FLQGKAREFSSEQTR

SEQ ID NO: 2095 - protein, 9 aa, HIV-1
FLQGKAREF

SEQ ID NO: 2096 - protein, 15 aa, HIV-1
FLREDLAFLQGKARE

SEQ ID NO: 2097 - protein, 9 aa, HIV-1
LAFLQGKAR

SEQ ID NO: 2098 - protein, 15 aa, HIV-1
FNFPQVTLWQRPLVT

SEQ ID NO: 2099 - protein, 9 aa, HIV-1
FPQVTLWQR

SEQ ID NO: 2100 - protein, 15 aa, HIV-1
FNFPQVTLWQRPLVT

SEQ ID NO: 2101 - protein, 9 aa, HIV-1
VTLWQRPLV

SEQ ID NO: 2102 - protein, 15 aa, HIV-1
FNLPPVVAKEIVASC

SEQ ID NO: 2103 - protein, 9 aa, HIV-1
VVAKEIVAS

SEQ ID NO: 2104 - protein, 15 aa, HIV-1
FPISPIETVPVKLKP

SEQ ID NO: 2105 - protein, 9 aa, HIV-1
IETVPVKLK

SEQ ID NO: 2106 - protein, 15 aa, HIV-1
FPISPIETVPVKLKP

SEQ ID NO: 2107 - protein, 9 aa, HIV-1
ISPIETVPV

SEQ ID NO: 2108 - protein, 15 aa, HIV-1
FPQVTLWQRPLVTIK

SEQ ID NO: 2109 - protein, 9 aa, HIV-1
LWQRPLVTI

SEQ ID NO: 2110 - protein, 15 aa, HIV-1
FPQVTLWQRPLVTIK

SEQ ID NO: 2111 - protein, 9 aa, HIV-1
TLWQRPLVT

SEQ ID NO: 2112 - protein, 15 aa, HIV-1
FPQVTLWQRPLVTIK

SEQ ID NO: 2113 - protein, 9 aa, HIV-1
VTLWQRPLV

SEQ ID NO: 2114 - protein, 15 aa, HIV-1
FQSSMTKILEPFRKQ

SEQ ID NO: 2115 - protein, 9 aa, HIV-1
FQSSMTKIL

SEQ ID NO: 2116 - protein, 15 aa, HIV-1
FQSSMTKILEPFRKQ

SEQ ID NO: 2117 - protein, 9 aa, HIV-1
TKILEPFRK

SEQ ID NO: 2118 - protein, 15 aa, HIV-1
FRKQNPDIVIYQYMD

SEQ ID NO: 2119 - protein, 9 aa, HIV-1
FRKQNPDIV

SEQ ID NO: 2120 - protein, 15 aa, HIV-1
FRKYTAFTIPSINNE

SEQ ID NO: 2121 - protein, 9 aa, HIV-1
FRKYTAFTI

SEQ ID NO: 2122 - protein, 15 aa, HIV-1
FRKYTAFTIPSINNE

SEQ ID NO: 2123 - protein, 9 aa, HIV-1
YTAFTIPSI

SEQ ID NO: 2124 - protein, 15 aa, HIV-1
FRNQRKIVKCFNCGK

SEQ ID NO: 2125 - protein, 9 aa, HIV-1
FRNQRKIVK

SEQ ID NO: 2126 - protein, 15 aa, HIV-1
FRVYYRDSRNPLWKG

SEQ ID NO: 2127 - protein, 9 aa, HIV-1
FRVYYRDSR

SEQ ID NO: 2128 - protein, 15 aa, HIV-1
FRVYYRDSRNPLWKG

SEQ ID NO: 2129 - protein, 9 aa, HIV-1
YRDSRNPLW

SEQ ID NO: 2130 - protein, 15 aa, HIV-1
FRVYYRDSRNPLWKG

SEQ ID NO: 2131 - protein, 9 aa, HIV-1
YYRDSRNPL

SEQ ID NO: 2132 - protein, 15 aa, HIV-1
FSPEVIPMFSALSEG

SEQ ID NO: 2133 - protein, 9 aa, HIV-1
VIPMFSALS

SEQ ID NO: 2134 - protein, 15 aa, HIV-1
FSSEQTRANSPTRRE

SEQ ID NO: 2135 - protein, 9 aa, HIV-1
FSSEQTRAN

SEQ ID NO: 2136 - protein, 15 aa, HIV-1
FSSEQTRANSPTRRE

SEQ ID NO: 2137 - protein, 9 aa, HIV-1
QTRANSPTR

SEQ ID NO: 2138 - protein, 15 aa, HIV-1
FSSEQTRANSPTRRE

SEQ ID NO: 2139 - protein, 9 aa, HIV-1
TRANSPTRR

SEQ ID NO: 2140 - protein, 15 aa, HIV-1
FTGATVRAACWWAGI

SEQ ID NO: 2141 - protein, 9 aa, HIV-1
FTGATVRAA

SEQ ID NO: 2142 - protein, 15 aa, HIV-1
FTIPSINNETPGIRY

SEQ ID NO: 2143 - protein, 9 aa, HIV-1
INNETPGIR

SEQ ID NO: 2144 - protein, 15 aa, HIV-1
FVNTPPLVKLWYQLE

SEQ ID NO: 2145 - protein, 9 aa, HIV-1
FVNTPPLVK

SEQ ID NO: 2146 - protein, 15 aa, HIV-1
FVNTPPLVKLWYQLE

SEQ ID NO: 2147 - protein, 9 aa, HIV-1
VNTPPLVKL

SEQ ID NO: 2148 - protein, 15 aa, HIV-1
FWEVQLGIPHPAGLK

SEQ ID NO: 2149 - protein, 9 aa, HIV-1
VQLGIPHPA

SEQ ID NO: 2150 - protein, 15 aa, HIV-1
FYKTLRAEQASQEVK

SEQ ID NO: 2151 - protein, 9 aa, HIV-1
FYKTLRAEQ

SEQ ID NO: 2152 - protein, 15 aa, HIV-1
FYKTLRAEQASQEVK

SEQ ID NO: 2153 - protein, 9 aa, HIV-1
YKTLRAEQA

SEQ ID NO: 2154 - protein, 15 aa, HIV-1
FYVDGAANRETKLGK

SEQ ID NO: 2155 - protein, 9 aa, HIV-1
VDGAANRET

SEQ ID NO: 2156 - protein, 15 aa, HIV-1
GADDTVLEEMSLPGR

SEQ ID NO: 2157 - protein, 9 aa, HIV-1
VLEEMSLPG

SEQ ID NO: 2158 - protein, 15 aa, HIV-1
GAETFYVDGAANRET

SEQ ID NO: 2159 - protein, 9 aa, HIV-1
YVDGAANRE

SEQ ID NO: 2160 - protein, 15 aa, HIV-1
GATPQDLNTMLNTVG

SEQ ID NO: 2161 - protein, 9 aa, HIV-1
DLNTMLNTV

SEQ ID NO: 2162 - protein, 15 aa, HIV-1
GATPQDLNTMLNTVG

SEQ ID NO: 2163 - protein, 9 aa, HIV-1
PQDLNTMLN

SEQ ID NO: 2164 - protein, 15 aa, HIV-1
GATVRAACWWAGIKQ

SEQ ID NO: 2165 - protein, 9 aa, HIV-1
VRAACWWAG

SEQ ID NO: 2166 - protein, 15 aa, HIV-1
GCRQILGQLQPSLQT

SEQ ID NO: 2167 - protein, 9 aa, HIV-1
LGQLQPSLQ

SEQ ID NO: 2168 - protein, 15 aa, HIV-1
GCTLNFPISPIETVP

SEQ ID NO: 2169 - protein, 9 aa, HIV-1
FPISPIETV

SEQ ID NO: 2170 - protein, 15 aa, HIV-1
GDAYFSVPLDEDFRK

SEQ ID NO: 2171 - protein, 9 aa, HIV-1
YFSVPLDED

SEQ ID NO: 2172 - protein, 15 aa, HIV-1
GEIYKRWIILGLNKI

SEQ ID NO: 2173 - protein, 9 aa, HIV-1
IYKRWIILG

SEQ ID NO: 2174 - protein, 15 aa, HIV-1
GEIYKRWIILGLNKI

SEQ ID NO: 2175 - protein, 9 aa, HIV-1
YKRWIILGL

SEQ ID NO: 2176 - protein, 15 aa, HIV-1
GERIVDIIATDIQTK

SEQ ID NO: 2177 - protein, 9 aa, HIV-1
IVDIIATDI

SEQ ID NO: 2178 - protein, 15 aa, HIV-1
GGHQAAMQMLKETIN

SEQ ID NO: 2179 - protein, 9 aa, HIV-1
AAMQMLKET

SEQ ID NO: 2180 - protein, 15 aa, HIV-1
GHKAIGTVLVGPTPV

SEQ ID NO: 2181 - protein, 9 aa, HIV-1
HKAIGTVLV

SEQ ID NO: 2182 - protein, 15 aa, HIV-1
GHKAIGTVLVGPTPV

SEQ ID NO: 2183 - protein, 9 aa, HIV-1
IGTVLVGPT

SEQ ID NO: 2184 - protein, 15 aa, HIV-1
GHKARVLAEAMSQVT

SEQ ID NO: 2185 - protein, 9 aa, HIV-1
VLAEAMSQV

SEQ ID NO: 2186 - protein, 15 aa, HIV-1
GIIQAQPDQSESELV

SEQ ID NO: 2187 - protein, 9 aa, HIV-1
IIQAQPDQS

SEQ ID NO: 2188 - protein, 15 aa, HIV-1
GIIQAQPDQSESELV

SEQ ID NO: 2189 - protein, 9 aa, HIV-1
IQAQPDQSE

SEQ ID NO: 2190 - protein, 15 aa, HIV-1
GIKVRQLCKLLRGTK

SEQ ID NO: 2191 - protein, 9 aa, HIV-1
VRQLCKLLR

SEQ ID NO: 2192 - protein, 15 aa, HIV-1
GIPYNPQSQGVVESM

SEQ ID NO: 2193 - protein, 9 aa, HIV-1
PYNPQSQGV

SEQ ID NO: 2194 - protein, 15 aa, HIV-1
GIRYQYNVLPQGWKG

SEQ ID NO: 2195 - protein, 9 aa, HIV-1
IRYQYNVLP

SEQ ID NO: 2196 - protein, 15 aa, HIV-1
GIRYQYNVLPQGWKG

SEQ ID NO: 2197 - protein, 9 aa, HIV-1
YQYNVLPQG

SEQ ID NO: 2198 - protein, 15 aa, HIV-1
GKAGYVTNRGRQKVV

SEQ ID NO: 2199 - protein, 9 aa, HIV-1
VTNRGRQKV

SEQ ID NO: 2200 - protein, 15 aa, HIV-1
GKAGYVTNRGRQKVV

SEQ ID NO: 2201 - protein, 9 aa, HIV-1
YVTNRGRQK

SEQ ID NO: 2202 - protein, 15 aa, HIV-1
GKAREFSSEQTRANS

SEQ ID NO: 2203 - protein, 9 aa, HIV-1
FSSEQTRAN

SEQ ID NO: 2204 - protein, 15 aa, HIV-1
GKISKIGPENPYNTP

SEQ ID NO: 2205 - protein, 9 aa, HIV-1
IGPENPYNT

SEQ ID NO: 2206 - protein, 15 aa, HIV-1
GKKKYKLKHIVWASR

SEQ ID NO: 2207 - protein, 9 aa, HIV-1
YKLKHIVWA

SEQ ID NO: 2208 - protein, 15 aa, HIV-1
GKVILVAVHVASGYI

SEQ ID NO: 2209 - protein, 9 aa, HIV-1
LVAVHVASG

SEQ ID NO: 2210 - protein, 15 aa, HIV-1
GKVILVAVHVASGYI

SEQ ID NO: 2211 - protein, 9 aa, HIV-1
VILVAVHVA

SEQ ID NO: 2212 - protein, 15 aa, HIV-1
GKYARMRGAHTNDVK

SEQ ID NO: 2213 - protein, 9 aa, HIV-1
MRGAHTNDV

SEQ ID NO: 2214 - protein, 15 aa, HIV-1
GKYARMRGAHTNDVK

SEQ ID NO: 2215 - protein, 9 aa, HIV-1
YARMRGAHT

SEQ ID NO: 2216 - protein, 15 aa, HIV-1
GLEVNIVTDSQYALG

SEQ ID NO: 2217 - protein, 9 aa, HIV-1
VNIVTDSQY

SEQ ID NO: 2218 - protein, 15 aa, HIV-1
GLKKKKSVTVLDVGD

SEQ ID NO: 2219 - protein, 9 aa, HIV-1
LKKKKSVTV

SEQ ID NO: 2220 - protein, 15 aa, HIV-1
GLNKIVRMYSPTSIL

SEQ ID NO: 2221 - protein, 9 aa, HIV-1
IVRMYSPTS

SEQ ID NO: 2222 - protein, 15 aa, HIV-1
GLNKIVRMYSPTSIL

SEQ ID NO: 2223 - protein, 9 aa, HIV-1
LNKIVRMYS

SEQ ID NO: 2224 - protein, 15 aa, HIV-1
GLNKIVRMYSPTSIL

SEQ ID NO: 2225 - protein, 9 aa, HIV-1
VRMYSPTSI

SEQ ID NO: 2226 - protein, 15 aa, HIV-1
GMDGPKVKQWPLTEE

SEQ ID NO: 2227 - protein, 9 aa, HIV-1
KVKQWPLTE

SEQ ID NO: 2228 - protein, 15 aa, HIV-1
GNEQVDKLVSAGIRK

SEQ ID NO: 2229 - protein, 9 aa, HIV-1
VDKLVSAGI

SEQ ID NO: 2230 - protein, 15 aa, HIV-1
GNFRNQRKIVKCFNC

SEQ ID NO: 2231 - protein, 9 aa, HIV-1
FRNQRKIVK

SEQ ID NO: 2232 - protein, 15 aa, HIV-1
GPAKLLWKGEGAVVI

SEQ ID NO: 2233 - protein, 9 aa, HIV-1
LWKGEGAVV

SEQ ID NO: 2234 - protein, 15 aa, HIV-1
GPKVKQWPLTEEKIK

SEQ ID NO: 2235 - protein, 9 aa, HIV-1
VKQWPLTEE

SEQ ID NO: 2236 - protein, 15 aa, HIV-1
GPTPVNIIGRNLLTQ

SEQ ID NO: 2237 - protein, 9 aa, HIV-1
VNIIGRNLL

SEQ ID NO: 2238 - protein, 15 aa, HIV-1
GPAATLEEMMTACQG

SEQ ID NO: 2239 - protein, 9 aa, HIV-1
LEEMMTACQ

SEQ ID NO: 2240 - protein, 15 aa, HIV-1
GQETAYFLLKLAGRW

SEQ ID NO: 2241 - protein, 9 aa, HIV-1
YFLLKLAGR

SEQ ID NO: 2242 - protein, 15 aa, HIV-1
GQLQPSLQTGSEELR

SEQ ID NO: 2243 - protein, 9 aa, HIV-1
GQLQPSLQT

SEQ ID NO: 2244 - protein, 15 aa, HIV-1
GQMVHQAISPRTLNA

SEQ ID NO: 2245 - protein, 9 aa, HIV-1
MVHQAISPR

SEQ ID NO: 2246 - protein, 15 aa, HIV-1
GQMVHQAISPRTLNA

SEQ ID NO: 2247 - protein, 9 aa, HIV-1
VHQAISPRT

SEQ ID NO: 2248 - protein, 15 aa, HIV-1
GRNLLTQIGCTLNFP

SEQ ID NO: 2249 - protein, 9 aa, HIV-1
GRNLLTQIG

SEQ ID NO: 2250 - protein, 15 aa, HIV-1
GRQKVVTLTDTTNQK

SEQ ID NO: 2251 - protein, 9 aa, HIV-1
VTLTDTTNQ

SEQ ID NO: 2252 - protein, 15 aa, HIV-1
GRQKVVTLTDTTNQK

SEQ ID NO: 2253 - protein, 9 aa, HIV-1
VVTLTDTTN

SEQ ID NO: 2254 - protein, 15 aa, HIV-1
GRWPVKTIHTDNGSN

SEQ ID NO: 2255 - protein, 9 aa, HIV-1
VKTIHTDNG

SEQ ID NO: 2256 - protein, 15 aa, HIV-1
GSDIAGTTSTLQEQI

SEQ ID NO: 2257 - protein, 9 aa, HIV-1
IAGTTSTLQ

SEQ ID NO: 2258 - protein, 15 aa, HIV-1
GSEELRSLYNTVATL

SEQ ID NO: 2259 - protein, 9 aa, HIV-1
LRSLYNTVA

SEQ ID NO: 2260 - protein, 15 aa, HIV-1
GSNFTGATVRAACWW

SEQ ID NO: 2261 - protein, 9 aa, HIV-1
FTGATVRAA

SEQ ID NO: 2262 - protein, 15 aa, HIV-1
GSPAIFQSSMTKILE

SEQ ID NO: 2263 - protein, 9 aa, HIV-1
FQSSMTKIL

SEQ ID NO: 2264 - protein, 15 aa, HIV-1
GTTSTLQEQIGWMTN

SEQ ID NO: 2265 - protein, 9 aa, HIV-1
LQEQIGWMT

SEQ ID NO: 2266 - protein, 15 aa, HIV-1
GTVLVGPTPVNIIGR

SEQ ID NO: 2267 - protein, 9 aa, HIV-1
LVGPTPVNI

SEQ ID NO: 2268 - protein, 15 aa, HIV-1
GTVSFNFPQVTLWQR

SEQ ID NO: 2269 - protein, 9 aa, HIV-1
VSFNFPQVT

SEQ ID NO: 2270 - protein, 15 aa, HIV-1
GWKGSPAIFQSSMTK

SEQ ID NO: 2271 - protein, 9 aa, HIV-1
WKGSPAIFQ

SEQ ID NO: 2272 - protein, 15 aa, HIV-1
GWMTNNPPIPVGEIY

SEQ ID NO: 2273 - protein, 9 aa, HIV-1
MTNNPPIPV

SEQ ID NO: 2274 - protein, 15 aa, HIV-1
GYVTNRGRQKVVTLT

SEQ ID NO: 2275 - protein, 9 aa, HIV-1
VTNRGRQKV

SEQ ID NO: 2276 - protein, 15 aa, HIV-1
HEKYHSNWRAMASDF

SEQ ID NO: 2277 - protein, 9 aa, HIV-1
HSNWRAMAS

SEQ ID NO: 2278 - protein, 15 aa, HIV-1
HEKYHSNWRAMASDF

SEQ ID NO: 2279 - protein, 9 aa, HIV-1
YHSNWRAMA

SEQ ID NO: 2280 - protein, 15 aa, HIV-1
HKAIGTVLVGPTPVN

SEQ ID NO: 2281 - protein, 9 aa, HIV-1
HKAIGTVLV

SEQ ID NO: 2282 - protein, 15 aa, HIV-1
HKAIGTVLVGPTPVN

SEQ ID NO: 2283 - protein, 9 aa, HIV-1
IGTVLVGPT

SEQ ID NO: 2284 - protein, 15 aa, HIV-1
HKARVLAEAMSQVTN

SEQ ID NO: 2285 - protein, 9 aa, HIV-1
LAEAMSQVT

SEQ ID NO: 2286 - protein, 15 aa, HIV-1
HLEGKVILVAVHVAS

SEQ ID NO: 2287 - protein, 9 aa, HIV-1
VILVAVHVA

SEQ ID NO: 2288 - protein, 15 aa, HIV-1
HLKTAVQMAVFIHNF

SEQ ID NO: 2289 - protein, 9 aa, HIV-1
LKTAVQMAV

SEQ ID NO: 2290 - protein, 15 aa, HIV-1
HLLRWGLTTPDKKHQ

SEQ ID NO: 2291 - protein, 9 aa, HIV-1
LLRWGLTTP

SEQ ID NO: 2292 - protein, 15 aa, HIV-1
HLLRWGLTTPDKKHQ

SEQ ID NO: 2293 - protein, 9 aa, HIV-1
LRWGLTTPD

SEQ ID NO: 2294 - protein, 15 aa, HIV-1
HLLRWGLTTPDKKHQ

SEQ ID NO: 2295 - protein, 9 aa, HIV-1
WGLTTPDKK

SEQ ID NO: 2296 - protein, 15 aa, HIV-1
HNFKRKGGIGGYSAG

SEQ ID NO: 2297 - protein, 9 aa, HIV-1
FKRKGGIGG

SEQ ID NO: 2298 - protein, 15 aa, HIV-1
HPAGLKKKKSVTVLD

SEQ ID NO: 2299 - protein, 9 aa, HIV-1
LKKKKSVTV

SEQ ID NO: 2300 - protein, 15 aa, HIV-1
HPDKWTVQPIVLPEK

SEQ ID NO: 2301 - protein, 9 aa, HIV-1
WTVQPIVLP

SEQ ID NO: 2302 - protein, 15 aa, HIV-1
HPVHAGPIAPGQMRE

SEQ ID NO: 2303 - protein, 9 aa, HIV-1
VHAGPIAPG

SEQ ID NO: 2304 - protein, 15 aa, HIV-1
HQKEPPFLWMGYELH

SEQ ID NO: 2305 - protein, 9 aa, HIV-1
KEPPFLWMG

SEQ ID NO: 2306 - protein, 15 aa, HIV-1
HQKEPPFLWMGYELH

SEQ ID NO: 2307 - protein, 9 aa, HIV-1
QKEPPFLWM

SEQ ID NO: 2308 - protein, 15 aa, HIV-1
HSNWRAMASDFNLPP

SEQ ID NO: 2309 - protein, 9 aa, HIV-1
WRAMASDFN

SEQ ID NO: 2310 - protein, 15 aa, HIV-1
IAGTTSTLQEQIGWM

SEQ ID NO: 2311 - protein, 9 aa, HIV-1
IAGTTSTLQ

SEQ ID NO: 2312 - protein, 15 aa, HIV-1
IATDIQTKELQKQIT

SEQ ID NO: 2313 - protein, 9 aa, HIV-1
IQTKELQKQ

SEQ ID NO: 2314 - protein, 15 aa, HIV-1
ICGHKAIGTVLVGPT

SEQ ID NO: 2315 - protein, 9 aa, HIV-1
HKAIGTVLV

SEQ ID NO: 2316 - protein, 15 aa, HIV-1
IEAEVIPAETGQETA

SEQ ID NO: 2317 - protein, 9 aa, HIV-1
IPAETGQET

SEQ ID NO: 2318 - protein, 15 aa, HIV-1
IEELRQHLLRWGLTT

SEQ ID NO: 2319 - protein, 9 aa, HIV-1
LRQHLLRWG

SEQ ID NO: 2320 - protein, 15 aa, HIV-1
IEICGHKAIGTVLVG

SEQ ID NO: 2321 - protein, 9 aa, HIV-1
ICGHKAIGT

SEQ ID NO: 2322 - protein, 15 aa, HIV-1
IEQLIKKEKVYLAWV

SEQ ID NO: 2323 - protein, 9 aa, HIV-1
IKKEKVYLA

SEQ ID NO: 2324 - protein, 15 aa, HIV-1
IETVPVKLKPGMDGP

SEQ ID NO: 2325 - protein, 9 aa, HIV-1
VKLKPGMDG

SEQ ID NO: 2326 - protein, 15 aa, HIV-1
IFQSSMTKILEPFRK

SEQ ID NO: 2327 - protein, 9 aa, HIV-1
FQSSMTKIL

SEQ ID NO: 2328 - protein, 15 aa, HIV-1
IFQSSMTKILEPFRK

SEQ ID NO: 2329 - protein, 9 aa, HIV-1
MTKILEPFR

SEQ ID NO: 2330 - protein, 15 aa, HIV-1
IGCTLNFPISPIETV

SEQ ID NO: 2331 - protein, 9 aa, HIV-1
NFPISPIET

SEQ ID NO: 2332 - protein, 15 aa, HIV-1
IGPENPYNTPVFAIK

SEQ ID NO: 2333 - protein, 9 aa, HIV-1
IGPENPYNT

SEQ ID NO: 2334 - protein, 15 aa, HIV-1
IGRNLLTQIGCTLNF

SEQ ID NO: 2335 - protein, 9 aa, HIV-1
GRNLLTQIG

SEQ ID NO: 2336 - protein, 15 aa, HIV-1
IGRNLLTQIGCTLNF

SEQ ID NO: 2337 - protein, 9 aa, HIV-1
IGRNLLTQI

SEQ ID NO: 2338 - protein, 15 aa, HIV-1
IGTVLVGPTPVNIIG

SEQ ID NO: 2339 - protein, 9 aa, HIV-1
IGTVLVGPT

SEQ ID NO: 2340 - protein, 15 aa, HIV-1
IGTVLVGPTPVNIIG

SEQ ID NO: 2341 - protein, 9 aa, HIV-1
LVGPTPVNI

SEQ ID NO: 2342 - protein, 15 aa, HIV-1
IGTVLVGPTPVNIIG

SEQ ID NO: 2343 - protein, 9 aa, HIV-1
VLVGPTPVN

SEQ ID NO: 2344 - protein, 15 aa, HIV-1
IGWMTNNPPIPVGEI

SEQ ID NO: 2345 - protein, 9 aa, HIV-1
IGWMTNNPP

SEQ ID NO: 2346 - protein, 15 aa, HIV-1
IGWMTNNPPIPVGEI

SEQ ID NO: 2347 - protein, 9 aa, HIV-1
MTNNPPIPV

SEQ ID NO: 2348 - protein, 15 aa, HIV-1
IGWMTNNPPIPVGEI

SEQ ID NO: 2349 - protein, 9 aa, HIV-1
WMTNNPPIP

SEQ ID NO: 2350 - protein, 15 aa, HIV-1
IHNFKRKGGIGGYSA

SEQ ID NO: 2351 - protein, 9 aa, HIV-1
FKRKGGIGG

SEQ ID NO: 2352 - protein, 15 aa, HIV-1
IIATDIQTKELQKQI

SEQ ID NO: 2353 - protein, 9 aa, HIV-1
IQTKELQKQ

SEQ ID NO: 2354 - protein, 15 aa, HIV-1
IIEQLIKKEKVYLAW

SEQ ID NO: 2355 - protein, 9 aa, HIV-1
IKKEKVYLA

SEQ ID NO: 2356 - protein, 15 aa, HIV-1
IIGRNLLTQIGCTLN

SEQ ID NO: 2357 - protein, 9 aa, HIV-1
GRNLLTQIG

SEQ ID NO: 2358 - protein, 15 aa, HIV-1
IIGRNLLTQIGCTLN

SEQ ID NO: 2359 - protein, 9 aa, HIV-1
IGRNLLTQI

SEQ ID NO: 2360 - protein, 15 aa, HIV-1
IILGLNKIVRMYSPT

SEQ ID NO: 2361 - protein, 9 aa, HIV-1
ILGLNKIVR

SEQ ID NO: 2362 - protein, 15 aa, HIV-1
IILGLNKIVRMYSPT

SEQ ID NO: 2363 - protein, 9 aa, HIV-1
LGLNKIVRM

SEQ ID NO: 2364 - protein, 15 aa, HIV-1
IILGLNKIVRMYSPT

SEQ ID NO: 2365 - protein, 9 aa, HIV-1
LNKIVRMYS

SEQ ID NO: 2366 - protein, 15 aa, HIV-1
IIQAQPDQSESELVN

SEQ ID NO: 2367 - protein, 9 aa, HIV-1
IIQAQPDQS

SEQ ID NO: 2368 - protein, 15 aa, HIV-1
IKKEKVYLAWVPAHK

SEQ ID NO: 2369 - protein, 9 aa, HIV-1
IKKEKVYLA

SEQ ID NO: 2370 - protein, 15 aa, HIV-1
IKKEKVYLAWVPAHK

SEQ ID NO: 2371 - protein, 9 aa, HIV-1
VYLAWVPAH

SEQ ID NO: 2372 - protein, 15 aa, HIV-1
IKVRQLCKLLRGTKA

SEQ ID NO: 2373 - protein, 9 aa, HIV-1
VRQLCKLLR

SEQ ID NO: 2374 - protein, 15 aa, HIV-1
IKVVPRRKAKIIRDY

SEQ ID NO: 2375 - protein, 9 aa, HIV-1
IKVVPRRKA

SEQ ID NO: 2376 - protein, 15 aa, HIV-1
ILEPFRKQNPDIVIY

SEQ ID NO: 2377 - protein, 9 aa, HIV-1
FRKQNPDIV

SEQ ID NO: 2378 - protein, 15 aa, HIV-1
ILGLNKIVRMYSPTS

SEQ ID NO: 2379 - protein, 9 aa, HIV-1
ILGLNKIVR

SEQ ID NO: 2380 - protein, 15 aa, HIV-1
ILGLNKIVRMYSPTS

SEQ ID NO: 2381 - protein, 9 aa, HIV-1
LGLNKIVRM

SEQ ID NO: 2382 - protein, 15 aa, HIV-1
ILGLNKIVRMYSPTS

SEQ ID NO: 2383 - protein, 9 aa, HIV-1
LNKIVRMYS

SEQ ID NO: 2384 - protein, 15 aa, HIV-1
ILGQLQPSLQTGSEE

SEQ ID NO: 2385 - protein, 9 aa, HIV-1
GQLQPSLQT

SEQ ID NO: 2386 - protein, 15 aa, HIV-1
ILGQLQPSLQTGSEE

SEQ ID NO: 2387 - protein, 9 aa, HIV-1
LGQLQPSLQ

SEQ ID NO: 2388 - protein, 15 aa, HIV-1
ILIEICGHKAIGTVL

SEQ ID NO: 2389 - protein, 9 aa, HIV-1
ICGHKAIGT

SEQ ID NO: 2390 - protein, 15 aa, HIV-1
ILKALGPAATLEEMM

SEQ ID NO: 2391 - protein, 9 aa, HIV-1
LKALGPAAT

SEQ ID NO: 2392 - protein, 15 aa, HIV-1
ILVAVHVASGYIEAE

SEQ ID NO: 2393 - protein, 9 aa, HIV-1
LVAVHVASG

SEQ ID NO: 2394 - protein, 15 aa, HIV-1
IMMQRGNFRNQRKIV

SEQ ID NO: 2395 - protein, 9 aa, HIV-1
IMMQRGNFR

SEQ ID NO: 2396 - protein, 15 aa, HIV-1
INNETPGIRYQYNVL

SEQ ID NO: 2397 - protein, 9 aa, HIV-1
INNETPGIR

SEQ ID NO: 2398 - protein, 15 aa, HIV-1
IPEWEFVNTPPLVKL

SEQ ID NO: 2399 - protein, 9 aa, HIV-1
FVNTPPLVK

SEQ ID NO: 2400 - protein, 15 aa, HIV-1
IPEWEFVNTPPLVKL

SEQ ID NO: 2401 - protein, 9 aa, HIV-1
WEFVNTPPL

SEQ ID NO: 2402 - protein, 15 aa, HIV-1
IPHPAGLKKKKSVTV

SEQ ID NO: 2403 - protein, 9 aa, HIV-1
GLKKKKSVT

SEQ ID NO: 2404 - protein, 15 aa, HIV-1
IPHPAGLKKKKSVTV

SEQ ID NO: 2405 - protein, 9 aa, HIV-1
PAGLKKKKS

SEQ ID NO: 2406 - protein, 15 aa, HIV-1
IPMFSALSEGATPQD

SEQ ID NO: 2407 - protein, 9 aa, HIV-1
MFSALSEGA

SEQ ID NO: 2408 - protein, 15 aa, HIV-1
IPSINNETPGIRYQY

SEQ ID NO: 2409 - protein, 9 aa, HIV-1
INNETPGIR

SEQ ID NO: 2410 - protein, 15 aa, HIV-1
IPVGEIYKRWIILGL

SEQ ID NO: 2411 - protein, 9 aa, HIV-1
IYKRWIILG

SEQ ID NO: 2412 - protein, 15 aa, HIV-1
IQDNSDIKVVPRRKA

SEQ ID NO: 2413 - protein, 9 aa, HIV-1
IQDNSDIKV

SEQ ID NO: 2414 - protein, 15 aa, HIV-1
IQGQMVHQAISPRTL

SEQ ID NO: 2415 - protein, 9 aa, HIV-1
MVHQAISPR

SEQ ID NO: 2416 - protein, 15 aa, HIV-1
IQGQMVHQAISPRTL

SEQ ID NO: 2417 - protein, 9 aa, HIV-1
VHQAISPRT

SEQ ID NO: 2418 - protein, 15 aa, HIV-1
IQKETWETWWTEYWQ

SEQ ID NO: 2419 - protein, 9 aa, HIV-1
WETWWTEYW

SEQ ID NO: 2420 - protein, 15 aa, HIV-1
IQKLVGKLNWASQIY

SEQ ID NO: 2421 - protein, 9 aa, HIV-1
LVGKLNWAS

SEQ ID NO: 2422 - protein, 15 aa, HIV-1
IQKLVGKLNWASQIY

SEQ ID NO: 2423 - protein, 9 aa, HIV-1
VGKLNWASQ

SEQ ID NO: 2424 - protein, 15 aa, HIV-1
IQNFRVYYRDSRNPL

SEQ ID NO: 2425 - protein, 9 aa, HIV-1
IQNFRVYYR

SEQ ID NO: 2426 - protein, 15 aa, HIV-1
IQTKELQKQITKIQN

SEQ ID NO: 2427 - protein, 9 aa, HIV-1
LQKQITKIQ

SEQ ID NO: 2428 - protein, 15 aa, HIV-1
IRYQYNVLPQGWKGS

SEQ ID NO: 2429 - protein, 9 aa, HIV-1
IRYQYNVLP

SEQ ID NO: 2430 - protein, 15 aa, HIV-1
IRYQYNVLPQGWKGS

SEQ ID NO: 2431 - protein, 9 aa, HIV-1
YQYNVLPQG

SEQ ID NO: 2432 - protein, 15 aa, HIV-1
ISKIGPENPYNTPVF

SEQ ID NO: 2433 - protein, 9 aa, HIV-1
IGPENPYNT

SEQ ID NO: 2434 - protein, 15 aa, HIV-1
ISPIETVPVKLKPGM

SEQ ID NO: 2435 - protein, 9 aa, HIV-1
ISPIETVPV

SEQ ID NO: 2436 - protein, 15 aa, HIV-1
ISPRTLNAWVKVVEE

SEQ ID NO: 2437 - protein, 9 aa, HIV-1
LNAWVKVVE

SEQ ID NO: 2438 - protein, 15 aa, HIV-1
ISPRTLNAWVKVVEE

SEQ ID NO: 2439 - protein, 9 aa, HIV-1
TLNAWVKVV

SEQ ID NO: 2440 - protein, 15 aa, HIV-1
ITKIQNFRVYYRDSR

SEQ ID NO: 2441 - protein, 9 aa, HIV-1
IQNFRVYYR

SEQ ID NO: 2442 - protein, 15 aa, HIV-1
ITKIQNFRVYYRDSR

SEQ ID NO: 2443 - protein, 9 aa, HIV-1
ITKIQNFRV

SEQ ID NO: 2444 - protein, 15 aa, HIV-1
ITTESIVIWGKTPKF

SEQ ID NO: 2445 - protein, 9 aa, HIV-1
ITTESIVIW

SEQ ID NO: 2446 - protein, 15 aa, HIV-1
ITTESIVIWGKTPKF

SEQ ID NO: 2447 - protein, 9 aa, HIV-1
IVIWGKTPK

SEQ ID NO: 2448 - protein, 15 aa, HIV-1
IVGAETFYVDGAANR

SEQ ID NO: 2449 - protein, 9 aa, HIV-1
IVGAETFYV

SEQ ID NO: 2450 - protein, 15 aa, HIV-1
IVIWGKTPKFKLPIQ

SEQ ID NO: 2451 - protein, 9 aa, HIV-1
IVIWGKTPK

SEQ ID NO: 2452 - protein, 15 aa, HIV-1
IVIWGKTPKFKLPIQ

SEQ ID NO: 2453 - protein, 9 aa, HIV-1
IWGKTPKFK

SEQ ID NO: 2454 - protein, 15 aa, HIV-1
IVIWGKTPKFKLPIQ

SEQ ID NO: 2455 - protein, 9 aa, HIV-1
VIWGKTPKF

SEQ ID NO: 2456 - protein, 15 aa, HIV-1
IVIYQYMDDLYVGSD

SEQ ID NO: 2457 - protein, 9 aa, HIV-1
YQYMDDLYV

SEQ ID NO: 2458 - protein, 15 aa, HIV-1
IVQNIQGQMVHQAIS

SEQ ID NO: 2459 - protein, 9 aa, HIV-1
IQGQMVHQA

SEQ ID NO: 2460 - protein, 15 aa, HIV-1
IVRMYSPTSILDIRQ

SEQ ID NO: 2461 - protein, 9 aa, HIV-1
IVRMYSPTS

SEQ ID NO: 2462 - protein, 15 aa, HIV-1
IVRMYSPTSILDIRQ

SEQ ID NO: 2463 - protein, 9 aa, HIV-1
VRMYSPTSI

SEQ ID NO: 2464 - protein, 15 aa, HIV-1
IVRMYSPTSILDIRQ

SEQ ID NO: 2465 - protein, 9 aa, HIV-1
YSPTSILDI

SEQ ID NO: 2466 - protein, 15 aa, HIV-1
IVTDSQYALGIIQAQ

SEQ ID NO: 2467 - protein, 9 aa, HIV-1
QYALGIIQA

SEQ ID NO: 2468 - protein, 15 aa, HIV-1
IYKRWIILGLNKIVR

SEQ ID NO: 2469 - protein, 9 aa, HIV-1
WIILGLNKI

SEQ ID NO: 2470 - protein, 15 aa, HIV-1
IYKRWIILGLNKIVR

SEQ ID NO: 2471 - protein, 9 aa, HIV-1
YKRWIILGL

SEQ ID NO: 2472 - protein, 15 aa, HIV-1
IYLALQDSGLEVNIV

SEQ ID NO: 2473 - protein, 9 aa, HIV-1
LQDSGLEVN

SEQ ID NO: 2474 - protein, 15 aa, HIV-1
IYPGIKVRQLCKLLR

SEQ ID NO: 2475 - protein, 9 aa, HIV-1
IKVRQLCKL

SEQ ID NO: 2476 - protein, 15 aa, HIV-1
IYPGIKVRQLCKLLR

SEQ ID NO: 2477 - protein, 9 aa, HIV-1
YPGIKVRQL

SEQ ID NO: 2478 - protein, 15 aa, HIV-1
IYQEPFKNLKTGKYA

SEQ ID NO: 2479 - protein, 9 aa, HIV-1
FKNLKTGKY

SEQ ID NO: 2480 - protein, 15 aa, HIV-1
KAFSPEVIPMFSALS

SEQ ID NO: 2481 - protein, 9 aa, HIV-1
EVIPMFSAL

SEQ ID NO: 2482 - protein, 15 aa, HIV-1
KAFSPEVIPMFSALS

SEQ ID NO: 2483 - protein, 9 aa, HIV-1
FSPEVIPMF

SEQ ID NO: 2484 - protein, 15 aa, HIV-1
KAFSPEVIPMFSALS

SEQ ID NO: 2485 - protein, 9 aa, HIV-1
KAFSPEVIP

SEQ ID NO: 2486 - protein, 15 aa, HIV-1
KAGYVTNRGRQKVVT

SEQ ID NO: 2487 - protein, 9 aa, HIV-1
VTNRGRQKV

SEQ ID NO: 2488 - protein, 15 aa, HIV-1
KAGYVTNRGRQKVVT

SEQ ID NO: 2489 - protein, 9 aa, HIV-1
YVTNRGRQK

SEQ ID NO: 2490 - protein, 15 aa, HIV-1
KAIGTVLVGPTPVNI

SEQ ID NO: 2491 - protein, 9 aa, HIV-1
IGTVLVGPT

SEQ ID NO: 2492 - protein, 15 aa, HIV-1
KAIGTVLVGPTPVNI

SEQ ID NO: 2493 - protein, 9 aa, HIV-1
VLVGPTPVN

SEQ ID NO: 2494 - protein, 15 aa, HIV-1
KALGPAATLEEMMTA

SEQ ID NO: 2495 - protein, 9 aa, HIV-1
LGPAATLEE

SEQ ID NO: 2496 - protein, 15 aa, HIV-1
KAREFSSEQTRANSP

SEQ ID NO: 2497 - protein, 9 aa, HIV-1
FSSEQTRAN

SEQ ID NO: 2498 - protein, 15 aa, HIV-1
KARVLAEAMSQVTNS

SEQ ID NO: 2499 - protein, 9 aa, HIV-1
LAEAMSQVT

SEQ ID NO: 2500 - protein, 15 aa, HIV-1
KCQLKGEAMHGQVDC

SEQ ID NO: 2501 - protein, 9 aa, HIV-1
LKGEAMHGQ

SEQ ID NO: 2502 - protein, 15 aa, HIV-1
KEKVYLAWVPAHKGI

SEQ ID NO: 2503 - protein, 9 aa, HIV-1
LAWVPAHKG

SEQ ID NO: 2504 - protein, 15 aa, HIV-1
KEKVYLAWVPAHKGI

SEQ ID NO: 2505 - protein, 9 aa, HIV-1
VYLAWVPAH

SEQ ID NO: 2506 - protein, 15 aa, HIV-1
KEKVYLAWVPAHKGI

SEQ ID NO: 2507 - protein, 9 aa, HIV-1
YLAWVPAHK

SEQ ID NO: 2508 - protein, 15 aa, HIV-1
KELKKIIGQVRDQAE

SEQ ID NO: 2509 - protein, 9 aa, HIV-1
LKKIIGQVR

SEQ ID NO: 2510 - protein, 15 aa, HIV-1
KELQKQITKIQNFRV

SEQ ID NO: 2511 - protein, 9 aa, HIV-1
LQKQITKIQ

SEQ ID NO: 2512 - protein, 15 aa, HIV-1
KEPIVGAETFYVDGA

SEQ ID NO: 2513 - protein, 9 aa, HIV-1
IVGAETFYV

SEQ ID NO: 2514 - protein, 15 aa, HIV-1
KEPPFLWMGYELHPD

SEQ ID NO: 2515 - protein, 9 aa, HIV-1
FLWMGYELH

SEQ ID NO: 2516 - protein, 15 aa, HIV-1
KETWETWWTEYWQAT

SEQ ID NO: 2517 - protein, 9 aa, HIV-1
WETWWTEYW

SEQ ID NO: 2518 - protein, 15 aa, HIV-1
KGSPAIFQSSMTKIL

SEQ ID NO: 2519 - protein, 9 aa, HIV-1
IFQSSMTKI

SEQ ID NO: 2520 - protein, 15 aa, HIV-1
KIEELRQHLLRWGLT

SEQ ID NO: 2521 - protein, 9 aa, HIV-1
LRQHLLRWG

SEQ ID NO: 2522 - protein, 15 aa, HIV-1
KIGPENPYNTPVFAI

SEQ ID NO: 2523 - protein, 9 aa, HIV-1
IGPENPYNT

SEQ ID NO: 2524 - protein, 15 aa, HIV-1
KILEPFRKQNPDIVI

SEQ ID NO: 2525 - protein, 9 aa, HIV-1
FRKQNPDIV

SEQ ID NO: 2526 - protein, 15 aa, HIV-1
KIQNFRVYYRDSRNP

SEQ ID NO: 2527 - protein, 9 aa, HIV-1
IQNFRVYYR

SEQ ID NO: 2528 - protein, 15 aa, HIV-1
KISKIGPENPYNTPV

SEQ ID NO: 2529 - protein, 9 aa, HIV-1
IGPENPYNT

SEQ ID NO: 2530 - protein, 15 aa, HIV-1
KITTESIVIWGKTPK

SEQ ID NO: 2531 - protein, 9 aa, HIV-1
ESIVIWGKT

SEQ ID NO: 2532 - protein, 15 aa, HIV-1
KITTESIVIWGKTPK

SEQ ID NO: 2533 - protein, 9 aa, HIV-1
SIVIWGKTP

SEQ ID NO: 2534 - protein, 15 aa, HIV-1
KIVRMYSPTSILDIR

SEQ ID NO: 2535 - protein, 9 aa, HIV-1
IVRMYSPTS

SEQ ID NO: 2536 - protein, 15 aa, HIV-1
KIVRMYSPTSILDIR

SEQ ID NO: 2537 - protein, 9 aa, HIV-1
VRMYSPTSI

SEQ ID NO: 2538 - protein, 15 aa, HIV-1
KIVRMYSPTSILDIR

SEQ ID NO: 2539 - protein, 9 aa, HIV-1
YSPTSILDI

SEQ ID NO: 2540 - protein, 15 aa, HIV-1
KKEKVYLAWVPAHKG

SEQ ID NO: 2541 - protein, 9 aa, HIV-1
KVYLAWVPA

SEQ ID NO: 2542 - protein, 15 aa, HIV-1
KKEKVYLAWVPAHKG

SEQ ID NO: 2543 - protein, 9 aa, HIV-1
VYLAWVPAH

SEQ ID NO: 2544 - protein, 15 aa, HIV-1
KKEKVYLAWVPAHKG

SEQ ID NO: 2545 - protein, 9 aa, HIV-1
YLAWVPAHK

SEQ ID NO: 2546 - protein, 15 aa, HIV-1
KKKYKLKHIVWASRE

SEQ ID NO: 2547 - protein, 9 aa, HIV-1
LKHIVWASR

SEQ ID NO: 2548 - protein, 15 aa, HIV-1
KKKYKLKHIVWASRE

SEQ ID NO: 2549 - protein, 9 aa, HIV-1
YKLKHIVWA

SEQ ID NO: 2550 - protein, 15 aa, HIV-1
KKSVTVLDVGDAYFS

SEQ ID NO: 2551 - protein, 9 aa, HIV-1
VTVLDVGDA

SEQ ID NO: 2552 - protein, 15 aa, HIV-1
KKYKLKHIVWASREL

SEQ ID NO: 2553 - protein, 9 aa, HIV-1
LKHIVWASR

SEQ ID NO: 2554 - protein, 15 aa, HIV-1
KKYKLKHIVWASREL

SEQ ID NO: 2555 - protein, 9 aa, HIV-1
YKLKHIVWA

SEQ ID NO: 2556 - protein, 15 aa, HIV-1
KLAGRWPVKTIHTDN

SEQ ID NO: 2557 - protein, 9 aa, HIV-1
LAGRWPVKT

SEQ ID NO: 2558 - protein, 15 aa, HIV-1
KLGKAGYVTNRGRQK

SEQ ID NO: 2559 - protein, 9 aa, HIV-1
GYVTNRGRQ

SEQ ID NO: 2560 - protein, 15 aa, HIV-1
KLGKAGYVTNRGRQK

SEQ ID NO: 2561 - protein, 9 aa, HIV-1
KAGYVTNRG

SEQ ID NO: 2562 - protein, 15 aa, HIV-1
KLKHIVWASRELERF

SEQ ID NO: 2563 - protein, 9 aa, HIV-1
LKHIVWASR

SEQ ID NO: 2564 - protein, 15 aa, HIV-1
KLLRGTKALTEVIPL

SEQ ID NO: 2565 - protein, 9 aa, HIV-1
LRGTKALTE

SEQ ID NO: 2566 - protein, 15 aa, HIV-1
KLLWKGEGAVVIQDN

SEQ ID NO: 2567 - protein, 9 aa, HIV-1
WKGEGAVVI

SEQ ID NO: 2568 - protein, 15 aa, HIV-1
KLVDFRELNKRTQDF

SEQ ID NO: 2569 - protein, 9 aa, HIV-1
FRELNKRTQ

SEQ ID NO: 2570 - protein, 15 aa, HIV-1
KLVDFRELNKRTQDF

SEQ ID NO: 2571 - protein, 9 aa, HIV-1
VDFRELNKR

SEQ ID NO: 2572 - protein, 15 aa, HIV-1
KLVGKLNWASQIYPG

SEQ ID NO: 2573 - protein, 9 aa, HIV-1
KLNWASQIY

SEQ ID NO: 2574 - protein, 15 aa, HIV-1
KLVGKLNWASQIYPG

SEQ ID NO: 2575 - protein, 9 aa, HIV-1
LVGKLNWAS

SEQ ID NO: 2576 - protein, 15 aa, HIV-1
KLVSAGIRKVLFLDG

SEQ ID NO: 2577 - protein, 9 aa, HIV-1
LVSAGIRKV

SEQ ID NO: 2578 - protein, 15 aa, HIV-1
KNLKTGKYARMRGAH

SEQ ID NO: 2579 - protein, 9 aa, HIV-1
LKTGKYARM

SEQ ID NO: 2580 - protein, 15 aa, HIV-1
KNWMTETLLVQNANP

SEQ ID NO: 2581 - protein, 9 aa, HIV-1
WMTETLLVQ

SEQ ID NO: 2582 - protein, 15 aa, HIV-1
KQEFGIPYNPQSQGV

SEQ ID NO: 2583 - protein, 9 aa, HIV-1
FGIPYNPQS

SEQ ID NO: 2584 - protein, 15 aa, HIV-1
KQITKIQNFRVYYRD

SEQ ID NO: 2585 - protein, 9 aa, HIV-1
IQNFRVYYR

SEQ ID NO: 2586 - protein, 15 aa, HIV-1
KQITKIQNFRVYYRD

SEQ ID NO: 2587 - protein, 9 aa, HIV-1
ITKIQNFRV

SEQ ID NO: 2588 - protein, 15 aa, HIV-1
KQLTEAVQKITTESI

SEQ ID NO: 2589 - protein, 9 aa, HIV-1
AVQKITTES

SEQ ID NO: 2590 - protein, 15 aa, HIV-1
KRWIILGLNKIVRMY

SEQ ID NO: 2591 - protein, 9 aa, HIV-1
ILGLNKIVR

SEQ ID NO: 2592 - protein, 15 aa, HIV-1
KRWIILGLNKIVRMY

SEQ ID NO: 2593 - protein, 9 aa, HIV-1
LGLNKIVRM

SEQ ID NO: 2594 - protein, 15 aa, HIV-1
KRWIILGLNKIVRMY

SEQ ID NO: 2595 - protein, 9 aa, HIV-1
WIILGLNKI

SEQ ID NO: 2596 - protein, 15 aa, HIV-1
KSVTVLDVGDAYFSV

SEQ ID NO: 2597 - protein, 9 aa, HIV-1
LDVGDAYFS

SEQ ID NO: 2598 - protein, 15 aa, HIV-1
KTAVQMAVFIHNFKR

SEQ ID NO: 2599 - protein, 9 aa, HIV-1
VQMAVFIHN

SEQ ID NO: 2600 - protein, 15 aa, HIV-1
KTELQAIYLALQDSG

SEQ ID NO: 2601 - protein, 9 aa, HIV-1
LQAIYLALQ

SEQ ID NO: 2602 - protein, 15 aa, HIV-1
KTGKYARMRGAHTND

SEQ ID NO: 2603 - protein, 9 aa, HIV-1
YARMRGAHT

SEQ ID NO: 2604 - protein, 15 aa, HIV-1
KTILKALGPAATLEE

SEQ ID NO: 2605 - protein, 9 aa, HIV-1
ILKALGPAA

SEQ ID NO: 2606 - protein, 15 aa, HIV-1
KTILKALGPAATLEE

SEQ ID NO: 2607 - protein, 9 aa, HIV-1
LKALGPAAT

SEQ ID NO: 2608 - protein, 15 aa, HIV-1
KVILVAVHVASGYIE

SEQ ID NO: 2609 - protein, 9 aa, HIV-1
LVAVHVASG

SEQ ID NO: 2610 - protein, 15 aa, HIV-1
KVILVAVHVASGYIE

SEQ ID NO: 2611 - protein, 9 aa, HIV-1
VILVAVHVA

SEQ ID NO: 2612 - protein, 15 aa, HIV-1
KVKQWPLTEEKIKAL

SEQ ID NO: 2613 - protein, 9 aa, HIV-1
VKQWPLTEE

SEQ ID NO: 2614 - protein, 15 aa, HIV-1
KVRQLCKLLRGTKAL

SEQ ID NO: 2615 - protein, 9 aa, HIV-1
VRQLCKLLR

SEQ ID NO: 2616 - protein, 15 aa, HIV-1
KVVTLTDTTNQKTEL

SEQ ID NO: 2617 - protein, 9 aa, HIV-1
VTLTDTTNQ

SEQ ID NO: 2618 - protein, 15 aa, HIV-1
KVYLAWVPAHKGIGG

SEQ ID NO: 2619 - protein, 9 aa, HIV-1
LAWVPAHKG

SEQ ID NO: 2620 - protein, 15 aa, HIV-1
KVYLAWVPAHKGIGG

SEQ ID NO: 2621 - protein, 9 aa, HIV-1
VYLAWVPAH

SEQ ID NO: 2622 - protein, 15 aa, HIV-1
KVYLAWVPAHKGIGG

SEQ ID NO: 2623 - protein, 9 aa, HIV-1
WVPAHKGIG

SEQ ID NO: 2624 - protein, 15 aa, HIV-1
KVYLAWVPAHKGIGG

SEQ ID NO: 2625 - protein, 9 aa, HIV-1
YLAWVPAHK

SEQ ID NO: 2626 - protein, 15 aa, HIV-1
KWRKLVDFRELNKRT

SEQ ID NO: 2627 - protein, 9 aa, HIV-1
VDFRELNKR

SEQ ID NO: 2628 - protein, 15 aa, HIV-1
KWTVQPIVLPEKDSW

SEQ ID NO: 2629 - protein, 9 aa, HIV-1
WTVQPIVLP

SEQ ID NO: 2630 - protein, 15 aa, HIV-1
KYARMRGAHTNDVKQ

SEQ ID NO: 2631 - protein, 9 aa, HIV-1
MRGAHTNDV

SEQ ID NO: 2632 - protein, 15 aa, HIV-1
KYHSNWRAMASDFNL

SEQ ID NO: 2633 - protein, 9 aa, HIV-1
WRAMASDFN

SEQ ID NO: 2634 - protein, 15 aa, HIV-1
KYHSNWRAMASDFNL

SEQ ID NO: 2635 - protein, 9 aa, HIV-1
YHSNWRAMA

SEQ ID NO: 2636 - protein, 15 aa, HIV-1
KYKLKHIVWASRELE

SEQ ID NO: 2637 - protein, 9 aa, HIV-1
LKHIVWASR

SEQ ID NO: 2638 - protein, 15 aa, HIV-1
LAEAMSQVTNSATIM

SEQ ID NO: 2639 - protein, 9 aa, HIV-1
AMSQVTNSA

SEQ ID NO: 2640 - protein, 15 aa, HIV-1
LAEAMSQVTNSATIM

SEQ ID NO: 2641 - protein, 9 aa, HIV-1
LAEAMSQVT

SEQ ID NO: 2642 - protein, 15 aa, HIV-1
LAENREILKEPVHGV

SEQ ID NO: 2643 - protein, 9 aa, HIV-1
EILKEPVHG

SEQ ID NO: 2644 - protein, 15 aa, HIV-1
LAFLQGKAREFSSEQ

SEQ ID NO: 2645 - protein, 9 aa, HIV-1
FLQGKAREF

SEQ ID NO: 2646 - protein, 15 aa, HIV-1
LAGRWPVKTIHTDNG

SEQ ID NO: 2647 - protein, 9 aa, HIV-1
LAGRWPVKT

SEQ ID NO: 2648 - protein, 15 aa, HIV-1
LAWVPAHKGIGGNEQ

SEQ ID NO: 2649 - protein, 9 aa, HIV-1
LAWVPAHKG

SEQ ID NO: 2650 - protein, 15 aa, HIV-1
LCKLLRGTKALTEVI

SEQ ID NO: 2651 - protein, 9 aa, HIV-1
LRGTKALTE

SEQ ID NO: 2652 - protein, 15 aa, HIV-1
LDEDFRKYTAFTIPS

SEQ ID NO: 2653 - protein, 9 aa, HIV-1
FRKYTAFTI

SEQ ID NO: 2654 - protein, 15 aa, HIV-1
LDVGDAYFSVPLDED

SEQ ID NO: 2655 - protein, 9 aa, HIV-1
DAYFSVPLD

SEQ ID NO: 2656 - protein, 15 aa, HIV-1
LEEMMTACQGVGGPG

SEQ ID NO: 2657 - protein, 9 aa, HIV-1
MTACQGVGG

SEQ ID NO: 2658 - protein, 15 aa, HIV-1
LEEMSLPGRWKPKMI

SEQ ID NO: 2659 - protein, 9 aa, HIV-1
LEEMSLPGR

SEQ ID NO: 2660 - protein, 15 aa, HIV-1
LEGKVILVAVHVASG

SEQ ID NO: 2661 - protein, 9 aa, HIV-1
KVILVAVHV

SEQ ID NO: 2662 - protein, 15 aa, HIV-1
LEGKVILVAVHVASG

SEQ ID NO: 2663 - protein, 9 aa, HIV-1
VILVAVHVA

SEQ ID NO: 2664 - protein, 15 aa, HIV-1
LEKEPIVGAETFYVD

SEQ ID NO: 2665 - protein, 9 aa, HIV-1
IVGAETFYV

SEQ ID NO: 2666 - protein, 15 aa, HIV-1
LEPFRKQNPDIVIYQ

SEQ ID NO: 2667 - protein, 9 aa, HIV-1
FRKQNPDIV

SEQ ID NO: 2668 - protein, 15 aa, HIV-1
LERFAVNPGLLETSE

SEQ ID NO: 2669 - protein, 9 aa, HIV-1
FAVNPGLLE

SEQ ID NO: 2670 - protein, 15 aa, HIV-1
LERFAVNPGLLETSE

SEQ ID NO: 2671 - protein, 9 aa, HIV-1
VNPGLLETS

SEQ ID NO: 2672 - protein, 15 aa, HIV-1
LEVNIVTDSQYALGI

SEQ ID NO: 2673 - protein, 9 aa, HIV-1
VNIVTDSQY

SEQ ID NO: 2674 - protein, 15 aa, HIV-1
LGIIQAQPDQSESEL

SEQ ID NO: 2675 - protein, 9 aa, HIV-1
IIQAQPDQS

SEQ ID NO: 2676 - protein, 15 aa, HIV-1
LGIIQAQPDQSESEL

SEQ ID NO: 2677 - protein, 9 aa, HIV-1
IQAQPDQSE

SEQ ID NO: 2678 - protein, 15 aa, HIV-1
LGKAGYVTNRGRQKV

SEQ ID NO: 2679 - protein, 9 aa, HIV-1
YVTNRGRQK

SEQ ID NO: 2680 - protein, 15 aa, HIV-1
LGLNKIVRMYSPTSI

SEQ ID NO: 2681 - protein, 9 aa, HIV-1
IVRMYSPTS

SEQ ID NO: 2682 - protein, 15 aa, HIV-1
LGLNKIVRMYSPTSI

SEQ ID NO: 2683 - protein, 9 aa, HIV-1
LGLNKIVRM

SEQ ID NO: 2684 - protein, 15 aa, HIV-1
LGLNKIVRMYSPTSI

SEQ ID NO: 2685 - protein, 9 aa, HIV-1
LNKIVRMYS

SEQ ID NO: 2686 - protein, 15 aa, HIV-1
LGPAATLEEMMTACQ

SEQ ID NO: 2687 - protein, 9 aa, HIV-1
AATLEEMMT

SEQ ID NO: 2688 - protein, 15 aa, HIV-1
LGQLQPSLQTGSEEL

SEQ ID NO: 2689 - protein, 9 aa, HIV-1
LGQLQPSLQ

SEQ ID NO: 2690 - protein, 15 aa, HIV-1
LHPDKWTVQPIVLPE

SEQ ID NO: 2691 - protein, 9 aa, HIV-1
WTVQPIVLP

SEQ ID NO: 2692 - protein, 15 aa, HIV-1
LIEICGHKAIGTVLV

SEQ ID NO: 2693 - protein, 9 aa, HIV-1
ICGHKAIGT

SEQ ID NO: 2694 - protein, 15 aa, HIV-1
LIKKEKVYLAWVPAH

SEQ ID NO: 2695 - protein, 9 aa, HIV-1
KVYLAWVPA

SEQ ID NO: 2696 - protein, 15 aa, HIV-1
LKALGPAATLEEMMT

SEQ ID NO: 2697 - protein, 9 aa, HIV-1
LKALGPAAT

SEQ ID NO: 2698 - protein, 15 aa, HIV-1
LKHIVWASRELERFA

SEQ ID NO: 2699 - protein, 9 aa, HIV-1
LKHIVWASR

SEQ ID NO: 2700 - protein, 15 aa, HIV-1
LKKKKSVTVLDVGDA

SEQ ID NO: 2701 - protein, 9 aa, HIV-1
LKKKKSVTV

SEQ ID NO: 2702 - protein, 15 aa, HIV-1
LKLAGRWPVKTIHTD

SEQ ID NO: 2703 - protein, 9 aa, HIV-1
LAGRWPVKT

SEQ ID NO: 2704 - protein, 15 aa, HIV-1
LKLAGRWPVKTIHTD

SEQ ID NO: 2705 - protein, 9 aa, HIV-1
LKLAGRWPV

SEQ ID NO: 2706 - protein, 15 aa, HIV-1
LKTAVQMAVFIHNFK

SEQ ID NO: 2707 - protein, 9 aa, HIV-1
LKTAVQMAV

SEQ ID NO: 2708 - protein, 15 aa, HIV-1
LKTAVQMAVFIHNFK

SEQ ID NO: 2709 - protein, 9 aa, HIV-1
VQMAVFIHN

SEQ ID NO: 2710 - protein, 15 aa, HIV-1
LKTGKYARMRGAHTN

SEQ ID NO: 2711 - protein, 9 aa, HIV-1
YARMRGAHT

SEQ ID NO: 2712 - protein, 15 aa, HIV-1
LLKLAGRWPVKTIHT

SEQ ID NO: 2713 - protein, 9 aa, HIV-1
LAGRWPVKT

SEQ ID NO: 2714 - protein, 15 aa, HIV-1
LLKLAGRWPVKTIHT

SEQ ID NO: 2715 - protein, 9 aa, HIV-1
LKLAGRWPV

SEQ ID NO: 2716 - protein, 15 aa, HIV-1
LLRWGLTTPDKKHQK

SEQ ID NO: 2717 - protein, 9 aa, HIV-1
LLRWGLTTP

SEQ ID NO: 2718 - protein, 15 aa, HIV-1
LLRWGLTTPDKKHQK

SEQ ID NO: 2719 - protein, 9 aa, HIV-1
LRWGLTTPD

SEQ ID NO: 2720 - protein, 15 aa, HIV-1
LLRWGLTTPDKKHQK

SEQ ID NO: 2721 - protein, 9 aa, HIV-1
WGLTTPDKK

SEQ ID NO: 2722 - protein, 15 aa, HIV-1
LLVQNANPDCKTILK

SEQ ID NO: 2723 - protein, 9 aa, HIV-1
VQNANPDCK

SEQ ID NO: 2724 - protein, 15 aa, HIV-1
LLWKGEGAVVIQDNS

SEQ ID NO: 2725 - protein, 9 aa, HIV-1
WKGEGAVVI

SEQ ID NO: 2726 - protein, 15 aa, HIV-1
LNFPISPIETVPVKL

SEQ ID NO: 2727 - protein, 9 aa, HIV-1
ISPIETVPV

SEQ ID NO: 2728 - protein, 15 aa, HIV-1
LNKIVRMYSPTSILD

SEQ ID NO: 2729 - protein, 9 aa, HIV-1
IVRMYSPTS

SEQ ID NO: 2730 - protein, 15 aa, HIV-1
LNKIVRMYSPTSILD

SEQ ID NO: 2731 - protein, 9 aa, HIV-1
LNKIVRMYS

SEQ ID NO: 2732 - protein, 15 aa, HIV-1
LNKIVRMYSPTSILD

SEQ ID NO: 2733 - protein, 9 aa, HIV-1
VRMYSPTSI

SEQ ID NO: 2734 - protein, 15 aa, HIV-1
LNTMLNTVGGHQAAM

SEQ ID NO: 2735 - protein, 9 aa, HIV-1
LNTMLNTVG

SEQ ID NO: 2736 - protein, 15 aa, HIV-1
LNTMLNTVGGHQAAM

SEQ ID NO: 2737 - protein, 9 aa, HIV-1
MLNTVGGHQ

SEQ ID NO: 2738 - protein, 15 aa, HIV-1
LNTVGGHQAAMQMLK

SEQ ID NO: 2739 - protein, 9 aa, HIV-1
VGGHQAAMQ

SEQ ID NO: 2740 - protein, 15 aa, HIV-1
LPPVVAKEIVASCDK

SEQ ID NO: 2741 - protein, 9 aa, HIV-1
VVAKEIVAS

SEQ ID NO: 2742 - protein, 15 aa, HIV-1
LPQGWKGSPAIFQSS

SEQ ID NO: 2743 - protein, 9 aa, HIV-1
WKGSPAIFQ

SEQ ID NO: 2744 - protein, 15 aa, HIV-1
LQAIYLALQDSGLEV

SEQ ID NO: 2745 - protein, 9 aa, HIV-1
LQAIYLALQ

SEQ ID NO: 2746 - protein, 15 aa, HIV-1
LQEQIGWMTNNPPIP

SEQ ID NO: 2747 - protein, 9 aa, HIV-1
IGWMTNNPP

SEQ ID NO: 2748 - protein, 15 aa, HIV-1
LQKQITKIQNFRVYY

SEQ ID NO: 2749 - protein, 9 aa, HIV-1
ITKIQNFRV

SEQ ID NO: 2750 - protein, 15 aa, HIV-1
LQKQITKIQNFRVYY

SEQ ID NO: 2751 - protein, 9 aa, HIV-1
LQKQITKIQ

SEQ ID NO: 2752 - protein, 15 aa, HIV-1
LREDLAFLQGKAREF

SEQ ID NO: 2753 - protein, 9 aa, HIV-1
LAFLQGKAR

SEQ ID NO: 2754 - protein, 15 aa, HIV-1
LRQHLLRWGLTTPDK

SEQ ID NO: 2755 - protein, 9 aa, HIV-1
LLRWGLTTP

SEQ ID NO: 2756 - protein, 15 aa, HIV-1
LRQHLLRWGLTTPDK

SEQ ID NO: 2757 - protein, 9 aa, HIV-1
LRWGLTTPD

SEQ ID NO: 2758 - protein, 15 aa, HIV-1
LRSLYNTVATLYCVH

SEQ ID NO: 2759 - protein, 9 aa, HIV-1
LYNTVATLY

SEQ ID NO: 2760 - protein, 15 aa, HIV-1
LRSLYNTVATLYCVH

SEQ ID NO: 2761 - protein, 9 aa, HIV-1
YNTVATLYC

SEQ ID NO: 2762 - protein, 15 aa, HIV-1
LRWGLTTPDKKHQKE

SEQ ID NO: 2763 - protein, 9 aa, HIV-1
LRWGLTTPD

SEQ ID NO: 2764 - protein, 15 aa, HIV-1
LRWGLTTPDKKHQKE

SEQ ID NO: 2765 - protein, 9 aa, HIV-1
WGLTTPDKK

SEQ ID NO: 2766 - protein, 15 aa, HIV-1
LTEAVQKITTESIVI

SEQ ID NO: 2767 - protein, 9 aa, HIV-1
VQKITTESI

SEQ ID NO: 2768 - protein, 15 aa, HIV-1
LTEEKIKALVEICTE

SEQ ID NO: 2769 - protein, 9 aa, HIV-1
IKALVEICT

SEQ ID NO: 2770 - protein, 15 aa, HIV-1
LVGKLNWASQIYPGI

SEQ ID NO: 2771 - protein, 9 aa, HIV-1
KLNWASQIY

SEQ ID NO: 2772 - protein, 15 aa, HIV-1
LVGKLNWASQIYPGI

SEQ ID NO: 2773 - protein, 9 aa, HIV-1
LVGKLNWAS

SEQ ID NO: 2774 - protein, 15 aa, HIV-1
LVGPTPVNIIGRNLL

SEQ ID NO: 2775 - protein, 9 aa, HIV-1
GPTPVNIIG

SEQ ID NO: 2776 - protein, 15 aa, HIV-1
LVGPTPVNIIGRNLL

SEQ ID NO: 2777 - protein, 9 aa, HIV-1
LVGPTPVNI

SEQ ID NO: 2778 - protein, 15 aa, HIV-1
LVKLWYQLEKEPIVG

SEQ ID NO: 2779 - protein, 9 aa, HIV-1
VKLWYQLEK

SEQ ID NO: 2780 - protein, 15 aa, HIV-1
LVSAGIRKVLFLDGI

SEQ ID NO: 2781 - protein, 9 aa, HIV-1
LVSAGIRKV

SEQ ID NO: 2782 - protein, 15 aa, HIV-1
LWKGEGAVVIQDNSD

SEQ ID NO: 2783 - protein, 9 aa, HIV-1
WKGEGAVVI

SEQ ID NO: 2784 - protein, 15 aa, HIV-1
LWKGPAKLLWKGEGA

SEQ ID NO: 2785 - protein, 9 aa, HIV-1
LWKGPAKLL

SEQ ID NO: 2786 - protein, 15 aa, HIV-1
LWQRPLVTIKIGGQL

SEQ ID NO: 2787 - protein, 9 aa, HIV-1
LWQRPLVTI

SEQ ID NO: 2788 - protein, 15 aa, HIV-1
LYNTVATLYCVHQRI

SEQ ID NO: 2789 - protein, 9 aa, HIV-1
LYNTVATLY

SEQ ID NO: 2790 - protein, 15 aa, HIV-1
LYNTVATLYCVHQRI

SEQ ID NO: 2791 - protein, 9 aa, HIV-1
YNTVATLYC

SEQ ID NO: 2792 - protein, 15 aa, HIV-1
MASDFNLPPVVAKEI

SEQ ID NO: 2793 - protein, 9 aa, HIV-1
DFNLPPVVA

SEQ ID NO: 2794 - protein, 15 aa, HIV-1
MASDFNLPPVVAKEI

SEQ ID NO: 2795 - protein, 9 aa, HIV-1
MASDFNLPP

SEQ ID NO: 2796 - protein, 15 aa, HIV-1
MAVFIHNFKRKGGIG

SEQ ID NO: 2797 - protein, 9 aa, HIV-1
FIHNFKRKG

SEQ ID NO: 2798 - protein, 15 aa, HIV-1
MAVFIHNFKRKGGIG

SEQ ID NO: 2799 - protein, 9 aa, HIV-1
IHNFKRKGG

SEQ ID NO: 2800 - protein, 15 aa, HIV-1
MDDLYVGSDLEIGQH

SEQ ID NO: 2801 - protein, 9 aa, HIV-1
YVGSDLEIG

SEQ ID NO: 2802 - protein, 15 aa, HIV-1
MDGPKVKQWPLTEEK

SEQ ID NO: 2803 - protein, 9 aa, HIV-1
VKQWPLTEE

SEQ ID NO: 2804 - protein, 15 aa, HIV-1
MFSALSEGATPQDLN

SEQ ID NO: 2805 - protein, 9 aa, HIV-1
MFSALSEGA

SEQ ID NO: 2806 - protein, 15 aa, HIV-1
MGARASVLSGGELDR

SEQ ID NO: 2807 - protein, 9 aa, HIV-1
MGARASVLS

SEQ ID NO: 2808 - protein, 15 aa, HIV-1
MLNTVGGHQAAMQML

SEQ ID NO: 2809 - protein, 9 aa, HIV-1
MLNTVGGHQ

SEQ ID NO: 2810 - protein, 15 aa, HIV-1
MLNTVGGHQAAMQML

SEQ ID NO: 2811 - protein, 9 aa, HIV-1
VGGHQAAMQ

SEQ ID NO: 2812 - protein, 15 aa, HIV-1
MMQRGNFRNQRKIVK

SEQ ID NO: 2813 - protein, 9 aa, HIV-1
NFRNQRKIV

SEQ ID NO: 2814 - protein, 15 aa, HIV-1
MMQRGNFRNQRKIVK

SEQ ID NO: 2815 - protein, 9 aa, HIV-1
QRGNFRNQR

SEQ ID NO: 2816 - protein, 15 aa, HIV-1
MMQRGNFRNQRKIVK

SEQ ID NO: 2817 - protein, 9 aa, HIV-1
RGNFRNQRK

SEQ ID NO: 2818 - protein, 15 aa, HIV-1
MNKELKKIIGQVRDQ

SEQ ID NO: 2819 - protein, 9 aa, HIV-1
LKKIIGQVR

SEQ ID NO: 2820 - protein, 15 aa, HIV-1
MQRGNFRNQRKIVKC

SEQ ID NO: 2821 - protein, 9 aa, HIV-1
FRNQRKIVK

SEQ ID NO: 2822 - protein, 15 aa, HIV-1
MRGAHTNDVKQLTEA

SEQ ID NO: 2823 - protein, 9 aa, HIV-1
MRGAHTNDV

SEQ ID NO: 2824 - protein, 15 aa, HIV-1
MSQVTNSATIMMQRG

SEQ ID NO: 2825 - protein, 9 aa, HIV-1
VTNSATIMM

SEQ ID NO: 2826 - protein, 15 aa, HIV-1
MTETLLVQNANPDCK

SEQ ID NO: 2827 - protein, 9 aa, HIV-1
LLVQNANPD

SEQ ID NO: 2828 - protein, 15 aa, HIV-1
MTETLLVQNANPDCK

SEQ ID NO: 2829 - protein, 9 aa, HIV-1
MTETLLVQN

SEQ ID NO: 2830 - protein, 15 aa, HIV-1
MTNNPPIPVGEIYKR

SEQ ID NO: 2831 - protein, 9 aa, HIV-1
MTNNPPIPV

SEQ ID NO: 2832 - protein, 15 aa, HIV-1
MVHQAISPRTLNAWV

SEQ ID NO: 2833 - protein, 9 aa, HIV-1
MVHQAISPR

SEQ ID NO: 2834 - protein, 15 aa, HIV-1
MVHQAISPRTLNAWV

SEQ ID NO: 2835 - protein, 9 aa, HIV-1
VHQAISPRT

SEQ ID NO: 2836 - protein, 15 aa, HIV-1
NDIQKLVGKLNWASQ

SEQ ID NO: 2837 - protein, 9 aa, HIV-1
LVGKLNWAS

SEQ ID NO: 2838 - protein, 15 aa, HIV-1
NEQVDKLVSAGIRKV

SEQ ID NO: 2839 - protein, 9 aa, HIV-1
VDKLVSAGI

SEQ ID NO: 2840 - protein, 15 aa, HIV-1
NETPGIRYQYNVLPQ

SEQ ID NO: 2841 - protein, 9 aa, HIV-1
IRYQYNVLP

SEQ ID NO: 2842 - protein, 15 aa, HIV-1
NFLREDLAFLQGKAR

SEQ ID NO: 2843 - protein, 9 aa, HIV-1
FLREDLAFL

SEQ ID NO: 2844 - protein, 15 aa, HIV-1
NFPISPIETVPVKLK

SEQ ID NO: 2845 - protein, 9 aa, HIV-1
ISPIETVPV

SEQ ID NO: 2846 - protein, 15 aa, HIV-1
NFPQVTLWQRPLVTI

SEQ ID NO: 2847 - protein, 9 aa, HIV-1
TLWQRPLVT

SEQ ID NO: 2848 - protein, 15 aa, HIV-1
NFRNQRKIVKCFNCG

SEQ ID NO: 2849 - protein, 9 aa, HIV-1
FRNQRKIVK

SEQ ID NO: 2850 - protein, 15 aa, HIV-1
NFRVYYRDSRNPLWK

SEQ ID NO: 2851 - protein, 9 aa, HIV-1
FRVYYRDSR

SEQ ID NO: 2852 - protein, 15 aa, HIV-1
NFRVYYRDSRNPLWK

SEQ ID NO: 2853 - protein, 9 aa, HIV-1
YRDSRNPLW

SEQ ID NO: 2854 - protein, 15 aa, HIV-1
NFRVYYRDSRNPLWK

SEQ ID NO: 2855 - protein, 9 aa, HIV-1
YYRDSRNPL

SEQ ID NO: 2856 - protein, 15 aa, HIV-1
NFTGATVRAACWWAG

SEQ ID NO: 2857 - protein, 9 aa, HIV-1
FTGATVRAA

SEQ ID NO: 2858 - protein, 15 aa, HIV-1
NGSNFTGATVRAACW

SEQ ID NO: 2859 - protein, 9 aa, HIV-1
FTGATVRAA

SEQ ID NO: 2860 - protein, 15 aa, HIV-1
NIIGRNLLTQIGCTL

SEQ ID NO: 2861 - protein, 9 aa, HIV-1
GRNLLTQIG

SEQ ID NO: 2862 - protein, 15 aa, HIV-1
NIIGRNLLTQIGCTL

SEQ ID NO: 2863 - protein, 9 aa, HIV-1
IGRNLLTQI

SEQ ID NO: 2864 - protein, 15 aa, HIV-1
NIQGQMVHQAISPRT

SEQ ID NO: 2865 - protein, 9 aa, HIV-1
IQGQMVHQA

SEQ ID NO: 2866 - protein, 15 aa, HIV-1
NIQGQMVHQAISPRT

SEQ ID NO: 2867 - protein, 9 aa, HIV-1
MVHQAISPR

SEQ ID NO: 2868 - protein, 15 aa, HIV-1
NKELKKIIGQVRDQA

SEQ ID NO: 2869 - protein, 9 aa, HIV-1
LKKIIGQVR

SEQ ID NO: 2870 - protein, 15 aa, HIV-1
NKIVRMYSPTSILDI

SEQ ID NO: 2871 - protein, 9 aa, HIV-1
IVRMYSPTS

SEQ ID NO: 2872 - protein, 15 aa, HIV-1
NKIVRMYSPTSILDI

SEQ ID NO: 2873 - protein, 9 aa, HIV-1
VRMYSPTSI

SEQ ID NO: 2874 - protein, 15 aa, HIV-1
NLKTGKYARMRGAHT

SEQ ID NO: 2875 - protein, 9 aa, HIV-1
GKYARMRGA

SEQ ID NO: 2876 - protein, 15 aa, HIV-1
NLKTGKYARMRGAHT

SEQ ID NO: 2877 - protein, 9 aa, HIV-1
LKTGKYARM

SEQ ID NO: 2878 - protein, 15 aa, HIV-1
NLKTGKYARMRGAHT

SEQ ID NO: 2879 - protein, 9 aa, HIV-1
NLKTGKYAR

SEQ ID NO: 2880 - protein, 15 aa, HIV-1
NLPPVVAKEIVASCD

SEQ ID NO: 2881 - protein, 9 aa, HIV-1
VVAKEIVAS

SEQ ID NO: 2882 - protein, 15 aa, HIV-1
NNETPGIRYQYNVLP

SEQ ID NO: 2883 - protein, 9 aa, HIV-1
NNETPGIRY

SEQ ID NO: 2884 - protein, 15 aa, HIV-1
NPDCKTILKALGPAA

SEQ ID NO: 2885 - protein, 9 aa, HIV-1
CKTILKALG

SEQ ID NO: 2886 - protein, 15 aa, HIV-1
NPDCKTILKALGPAA

SEQ ID NO: 2887 - protein, 9 aa, HIV-1
KTILKALGP

SEQ ID NO: 2888 - protein, 15 aa, HIV-1
NPDIVIYQYMDDLYV

SEQ ID NO: 2889 - protein, 9 aa, HIV-1
IVIYQYMDD

SEQ ID NO: 2890 - protein, 15 aa, HIV-1
NPLWKGPAKLLWKGE

SEQ ID NO: 2891 - protein, 9 aa, HIV-1
LWKGPAKLL

SEQ ID NO: 2892 - protein, 15 aa, HIV-1
NQKTELQAIYLALQD

SEQ ID NO: 2893 - protein, 9 aa, HIV-1
LQAIYLALQ

SEQ ID NO: 2894 - protein, 15 aa, HIV-1
NREILKEPVHGVYYD

SEQ ID NO: 2895 - protein, 9 aa, HIV-1
ILKEPVHGV

SEQ ID NO: 2896 - protein, 15 aa, HIV-1
NRGRQKVVTLTDTTN

SEQ ID NO: 2897 - protein, 9 aa, HIV-1
RQKVVTLTD

SEQ ID NO: 2898 - protein, 15 aa, HIV-1
NSATIMMQRGNFRNQ

SEQ ID NO: 2899 - protein, 9 aa, HIV-1
IMMQRGNFR

SEQ ID NO: 2900 - protein, 15 aa, HIV-1
NSDIKVVPRRKAKII

SEQ ID NO: 2901 - protein, 9 aa, HIV-1
IKVVPRRKA

SEQ ID NO: 2902 - protein, 15 aa, HIV-1
NTMLNTVGGHQAAMQ

SEQ ID NO: 2903 - protein, 9 aa, HIV-1
LNTVGGHQA

SEQ ID NO: 2904 - protein, 15 aa, HIV-1
NTMLNTVGGHQAAMQ

SEQ ID NO: 2905 - protein, 9 aa, HIV-1
MLNTVGGHQ

SEQ ID NO: 2906 - protein, 15 aa, HIV-1
NTPPLVKLWYQLEKE

SEQ ID NO: 2907 - protein, 9 aa, HIV-1
VKLWYQLEK

SEQ ID NO: 2908 - protein, 15 aa, HIV-1
NTPVFAIKKKDSTKW

SEQ ID NO: 2909 - protein, 9 aa, HIV-1
VFAIKKKDS

SEQ ID NO: 2910 - protein, 15 aa, HIV-1
NTVGGHQAAMQMLKE

SEQ ID NO: 2911 - protein, 9 aa, HIV-1
VGGHQAAMQ

SEQ ID NO: 2912 - protein, 15 aa, HIV-1
NVLPQGWKGSPAIFQ

SEQ ID NO: 2913 - protein, 9 aa, HIV-1
GWKGSPAIF

SEQ ID NO: 2914 - protein, 15 aa, HIV-1
NVLPQGWKGSPAIFQ

SEQ ID NO: 2915 - protein, 9 aa, HIV-1
QGWKGSPAI

SEQ ID NO: 2916 - protein, 15 aa, HIV-1
NWASQIYPGIKVRQL

SEQ ID NO: 2917 - protein, 9 aa, HIV-1
SQIYPGIKV

SEQ ID NO: 2918 - protein, 15 aa, HIV-1
NWRAMASDFNLPPVV

SEQ ID NO: 2919 - protein, 9 aa, HIV-1
MASDFNLPP

SEQ ID NO: 2920 - protein, 15 aa, HIV-1
NWRAMASDFNLPPVV

SEQ ID NO: 2921 - protein, 9 aa, HIV-1
WRAMASDFN

SEQ ID NO: 2922 - protein, 15 aa, HIV-1
NYPIVQNIQGQMVHQ

SEQ ID NO: 2923 - protein, 9 aa, HIV-1
VQNIQGQMV

SEQ ID NO: 2924 - protein, 15 aa, HIV-1
PAGLKKKKSVTVLDV

SEQ ID NO: 2925 - protein, 9 aa, HIV-1
LKKKKSVTV

SEQ ID NO: 2926 - protein, 15 aa, HIV-1
PAIFQSSMTKILEPF

SEQ ID NO: 2927 - protein, 9 aa, HIV-1
FQSSMTKIL

SEQ ID NO: 2928 - protein, 15 aa, HIV-1
PAKLLWKGEGAVVIQ

SEQ ID NO: 2929 - protein, 9 aa, HIV-1
WKGEGAVVI

SEQ ID NO: 2930 - protein, 15 aa, HIV-1
PDCKTILKALGPAAT

SEQ ID NO: 2931 - protein, 9 aa, HIV-1
CKTILKALG

SEQ ID NO: 2932 - protein, 15 aa, HIV-1
PDCKTILKALGPAAT

SEQ ID NO: 2933 - protein, 9 aa, HIV-1
ILKALGPAA

SEQ ID NO: 2934 - protein, 15 aa, HIV-1
PDIVIYQYMDDLYVG

SEQ ID NO: 2935 - protein, 9 aa, HIV-1
YQYMDDLYV

SEQ ID NO: 2936 - protein, 15 aa, HIV-1
PDKWTVQPIVLPEKD

SEQ ID NO: 2937 - protein, 9 aa, HIV-1
WTVQPIVLP

SEQ ID NO: 2938 - protein, 15 aa, HIV-1
PEVIPMFSALSEGAT

SEQ ID NO: 2939 - protein, 9 aa, HIV-1
VIPMFSALS

SEQ ID NO: 2940 - protein, 15 aa, HIV-1
PEWEFVNTPPLVKLW

SEQ ID NO: 2941 - protein, 9 aa, HIV-1
FVNTPPLVK

SEQ ID NO: 2942 - protein, 15 aa, HIV-1
PEWEFVNTPPLVKLW

SEQ ID NO: 2943 - protein, 9 aa, HIV-1
VNTPPLVKL

SEQ ID NO: 2944 - protein, 15 aa, HIV-1
PEWEFVNTPPLVKLW

SEQ ID NO: 2945 - protein, 9 aa, HIV-1
WEFVNTPPL

SEQ ID NO: 2946 - protein, 15 aa, HIV-1
PFKNLKTGKYARMRG

SEQ ID NO: 2947 - protein, 9 aa, HIV-1
FKNLKTGKY

SEQ ID NO: 2948 - protein, 15 aa, HIV-1
PFKNLKTGKYARMRG

SEQ ID NO: 2949 - protein, 9 aa, HIV-1
LKTGKYARM

SEQ ID NO: 2950 - protein, 15 aa, HIV-1
PFRKQNPDIVIYQYM

SEQ ID NO: 2951 - protein, 9 aa, HIV-1
FRKQNPDIV

SEQ ID NO: 2952 - protein, 15 aa, HIV-1
PGHKARVLAEAMSQV

SEQ ID NO: 2953 - protein, 9 aa, HIV-1
ARVLAEAMS

SEQ ID NO: 2954 - protein, 15 aa, HIV-1
PGIKVRQLCKLLRGT

SEQ ID NO: 2955 - protein, 9 aa, HIV-1
VRQLCKLLR

SEQ ID NO: 2956 - protein, 15 aa, HIV-1
PGIRYQYNVLPQGWK

SEQ ID NO: 2957 - protein, 9 aa, HIV-1
IRYQYNVLP

SEQ ID NO: 2958 - protein, 15 aa, HIV-1
PGIRYQYNVLPQGWK

SEQ ID NO: 2959 - protein, 9 aa, HIV-1
YQYNVLPQG

SEQ ID NO: 2960 - protein, 15 aa, HIV-1
PHPAGLKKKKSVTVL

SEQ ID NO: 2961 - protein, 9 aa, HIV-1
LKKKKSVTV

SEQ ID NO: 2962 - protein, 15 aa, HIV-1
PIETVPVKLKPGMDG

SEQ ID NO: 2963 - protein, 9 aa, HIV-1
TVPVKLKPG

SEQ ID NO: 2964 - protein, 15 aa, HIV-1
PIQKETWETWWTEYW

SEQ ID NO: 2965 - protein, 9 aa, HIV-1
KETWETWWT

SEQ ID NO: 2966 - protein, 15 aa, HIV-1
PISPIETVPVKLKPG

SEQ ID NO: 2967 - protein, 9 aa, HIV-1
ISPIETVPV

SEQ ID NO: 2968 - protein, 15 aa, HIV-1
PIVGAETFYVDGAAN

SEQ ID NO: 2969 - protein, 9 aa, HIV-1
IVGAETFYV

SEQ ID NO: 2970 - protein, 15 aa, HIV-1
PIVQNIQGQMVHQAI

SEQ ID NO: 2971 - protein, 9 aa, HIV-1
VQNIQGQMV

SEQ ID NO: 2972 - protein, 15 aa, HIV-1
PKVKQWPLTEEKIKA

SEQ ID NO: 2973 - protein, 9 aa, HIV-1
VKQWPLTEE

SEQ ID NO: 2974 - protein, 15 aa, HIV-1
PLDEDFRKYTAFTIP

SEQ ID NO: 2975 - protein, 9 aa, HIV-1
FRKYTAFTI

SEQ ID NO: 2976 - protein, 15 aa, HIV-1
PLTEEKIKALVEICT

SEQ ID NO: 2977 - protein, 9 aa, HIV-1
LTEEKIKAL

SEQ ID NO: 2978 - protein, 15 aa, HIV-1
PLVKLWYQLEKEPIV

SEQ ID NO: 2979 - protein, 9 aa, HIV-1
VKLWYQLEK

SEQ ID NO: 2980 - protein, 15 aa, HIV-1
PLWKGPAKLLWKGEG

SEQ ID NO: 2981 - protein, 9 aa, HIV-1
LWKGPAKLL

SEQ ID NO: 2982 - protein, 15 aa, HIV-1
PMFSALSEGATPQDL

SEQ ID NO: 2983 - protein, 9 aa, HIV-1
MFSALSEGA

SEQ ID NO: 2984 - protein, 15 aa, HIV-1
PPFLWMGYELHPDKW

SEQ ID NO: 2985 - protein, 9 aa, HIV-1
FLWMGYELH

SEQ ID NO: 2986 - protein, 15 aa, HIV-1
PPLVKLWYQLEKEPI

SEQ ID NO: 2987 - protein, 9 aa, HIV-1
VKLWYQLEK

SEQ ID NO: 2988 - protein, 15 aa, HIV-1
PPVVAKEIVASCDKC

SEQ ID NO: 2989 - protein, 9 aa, HIV-1
VVAKEIVAS

SEQ ID NO: 2990 - protein, 15 aa, HIV-1
PQDLNTMLNTVGGHQ

SEQ ID NO: 2991 - protein, 9 aa, HIV-1
DLNTMLNTV

SEQ ID NO: 2992 - protein, 15 aa, HIV-1
PQDLNTMLNTVGGHQ

SEQ ID NO: 2993 - protein, 9 aa, HIV-1
LNTMLNTVG

SEQ ID NO: 2994 - protein, 15 aa, HIV-1
PQGWKGSPAIFQSSM

SEQ ID NO: 2995 - protein, 9 aa, HIV-1
WKGSPAIFQ

SEQ ID NO: 2996 - protein, 15 aa, HIV-1
PQVTLWQRPLVTIKI

SEQ ID NO: 2997 - protein, 9 aa, HIV-1
LWQRPLVTI

SEQ ID NO: 2998 - protein, 15 aa, HIV-1
PQVTLWQRPLVTIKI

SEQ ID NO: 2999 - protein, 9 aa, HIV-1
TLWQRPLVT

SEQ ID NO: 3000 - protein, 15 aa, HIV-1
PRGSDIAGTTSTLQE

SEQ ID NO: 3001 - protein, 9 aa, HIV-1
IAGTTSTLQ

SEQ ID NO: 3002 - protein, 15 aa, HIV-1
PRTLNAWVKVVEEKA

SEQ ID NO: 3003 - protein, 9 aa, HIV-1
LNAWVKVVE

SEQ ID NO: 3004 - protein, 15 aa, HIV-1
PRTLNAWVKVVEEKA

SEQ ID NO: 3005 - protein, 9 aa, HIV-1
TLNAWVKVV

SEQ ID NO: 3006 - protein, 15 aa, HIV-1
PSINNETPGIRYQYN

SEQ ID NO: 3007 - protein, 9 aa, HIV-1
INNETPGIR

SEQ ID NO: 3008 - protein, 15 aa, HIV-1
PTPVNIIGRNLLTQI

SEQ ID NO: 3009 - protein, 9 aa, HIV-1
IIGRNLLTQ

SEQ ID NO: 3010 - protein, 15 aa, HIV-1
PTPVNIIGRNLLTQI

SEQ ID NO: 3011 - protein, 9 aa, HIV-1
VNIIGRNLL

SEQ ID NO: 3012 - protein, 15 aa, HIV-1
PVFAIKKKDSTKWRK

SEQ ID NO: 3013 - protein, 9 aa, HIV-1
IKKKDSTKW

SEQ ID NO: 3014 - protein, 15 aa, HIV-1
PVGEIYKRWIILGLN

SEQ ID NO: 3015 - protein, 9 aa, HIV-1
YKRWIILGL

SEQ ID NO: 3016 - protein, 15 aa, HIV-1
PVHAGPIAPGQMREP

SEQ ID NO: 3017 - protein, 9 aa, HIV-1
VHAGPIAPG

SEQ ID NO: 3018 - protein, 15 aa, HIV-1
PVKLKPGMDGPKVKQ

SEQ ID NO: 3019 - protein, 9 aa, HIV-1
VKLKPGMDG

SEQ ID NO: 3020 - protein, 15 aa, HIV-1
PVNIIGRNLLTQIGC

SEQ ID NO: 3021 - protein, 9 aa, HIV-1
GRNLLTQIG

SEQ ID NO: 3022 - protein, 15 aa, HIV-1
PVNIIGRNLLTQIGC

SEQ ID NO: 3023 - protein, 9 aa, HIV-1
VNIIGRNLL

SEQ ID NO: 3024 - protein, 15 aa, HIV-1
PVVAKEIVASCDKCQ

SEQ ID NO: 3025 - protein, 9 aa, HIV-1
VVAKEIVAS

SEQ ID NO: 3026 - protein, 15 aa, HIV-1
PAATLEEMMTACQGV

SEQ ID NO: 3027 - protein, 9 aa, HIV-1
LEEMMTACQ

SEQ ID NO: 3028 - protein, 15 aa, HIV-1
QAEHLKTAVQMAVFI

SEQ ID NO: 3029 - protein, 9 aa, HIV-1
LKTAVQMAV

SEQ ID NO: 3030 - protein, 15 aa, HIV-1
QAISPRTLNAWVKVV

SEQ ID NO: 3031 - protein, 9 aa, HIV-1
ISPRTLNAW

SEQ ID NO: 3032 - protein, 15 aa, HIV-1
QAIYLALQDSGLEVN

SEQ ID NO: 3033 - protein, 9 aa, HIV-1
YLALQDSGL

SEQ ID NO: 3034 - protein, 15 aa, HIV-1
QASQEVKNWMTETLL

SEQ ID NO: 3035 - protein, 9 aa, HIV-1
VKNWMTETL

SEQ ID NO: 3036 - protein, 15 aa, HIV-1
QATWIPEWEFVNTPP

SEQ ID NO: 3037 - protein, 9 aa, HIV-1
ATWIPEWEF

SEQ ID NO: 3038 - protein, 15 aa, HIV-1
QDEHEKYHSNWRAMA

SEQ ID NO: 3039 - protein, 9 aa, HIV-1
KYHSNWRAM

SEQ ID NO: 3040 - protein, 15 aa, HIV-1
QDFWEVQLGIPHPAG

SEQ ID NO: 3041 - protein, 9 aa, HIV-1
VQLGIPHPA

SEQ ID NO: 3042 - protein, 15 aa, HIV-1
QDLNTMLNTVGGHQA

SEQ ID NO: 3043 - protein, 9 aa, HIV-1
LNTMLNTVG

SEQ ID NO: 3044 - protein, 15 aa, HIV-1
QDLNTMLNTVGGHQA

SEQ ID NO: 3045 - protein, 9 aa, HIV-1
MLNTVGGHQ

SEQ ID NO: 3046 - protein, 15 aa, HIV-1
QDNSDIKVVPRRKAK

SEQ ID NO: 3047 - protein, 9 aa, HIV-1
IKVVPRRKA

SEQ ID NO: 3048 - protein, 15 aa, HIV-1
QDSGLEVNIVTDSQY

SEQ ID NO: 3049 - protein, 9 aa, HIV-1
LEVNIVTDS

SEQ ID NO: 3050 - protein, 15 aa, HIV-1
QEFGIPYNPQSQGVV

SEQ ID NO: 3051 - protein, 9 aa, HIV-1
PYNPQSQGV

SEQ ID NO: 3052 - protein, 15 aa, HIV-1
QEPFKNLKTGKYARM

SEQ ID NO: 3053 - protein, 9 aa, HIV-1
FKNLKTGKY

SEQ ID NO: 3054 - protein, 15 aa, HIV-1
QEQIGWMTNNPPIPV

SEQ ID NO: 3055 - protein, 9 aa, HIV-1
IGWMTNNPP

SEQ ID NO: 3056 - protein, 15 aa, HIV-1
QETAYFLLKLAGRWP

SEQ ID NO: 3057 - protein, 9 aa, HIV-1
FLLKLAGRW

SEQ ID NO: 3058 - protein, 15 aa, HIV-1
QETAYFLLKLAGRWP

SEQ ID NO: 3059 - protein, 9 aa, HIV-1
YFLLKLAGR

SEQ ID NO: 3060 - protein, 15 aa, HIV-1
QEVKNWMTETLLVQN

SEQ ID NO: 3061 - protein, 9 aa, HIV-1
VKNWMTETL

SEQ ID NO: 3062 - protein, 15 aa, HIV-1
QGKAREFSSEQTRAN

SEQ ID NO: 3063 - protein, 9 aa, HIV-1
AREFSSEQT

SEQ ID NO: 3064 - protein, 15 aa, HIV-1
QGQMVHQAISPRTLN

SEQ ID NO: 3065 - protein, 9 aa, HIV-1
MVHQAISPR

SEQ ID NO: 3066 - protein, 15 aa, HIV-1
QGQMVHQAISPRTLN

SEQ ID NO: 3067 - protein, 9 aa, HIV-1
VHQAISPRT

SEQ ID NO: 3068 - protein, 15 aa, HIV-1
QGTVSFNFPQVTLWQ

SEQ ID NO: 3069 - protein, 9 aa, HIV-1
VSFNFPQVT

SEQ ID NO: 3070 - protein, 15 aa, HIV-1
QGWKGSPAIFQSSMT

SEQ ID NO: 3071 - protein, 9 aa, HIV-1
WKGSPAIFQ

SEQ ID NO: 3072 - protein, 15 aa, HIV-1
QHLLRWGLTTPDKKH

SEQ ID NO: 3073 - protein, 9 aa, HIV-1
LLRWGLTTP

SEQ ID NO: 3074 - protein, 15 aa, HIV-1
QHLLRWGLTTPDKKH

SEQ ID NO: 3075 - protein, 9 aa, HIV-1
LRWGLTTPD

SEQ ID NO: 3076 - protein, 15 aa, HIV-1
QHLLRWGLTTPDKKH

SEQ ID NO: 3077 - protein, 9 aa, HIV-1
WGLTTPDKK

SEQ ID NO: 3078 - protein, 15 aa, HIV-1
QIGWMTNNPPIPVGE

SEQ ID NO: 3079 - protein, 9 aa, HIV-1
IGWMTNNPP

SEQ ID NO: 3080 - protein, 15 aa, HIV-1
QIGWMTNNPPIPVGE

SEQ ID NO: 3081 - protein, 9 aa, HIV-1
MTNNPPIPV

SEQ ID NO: 3082 - protein, 15 aa, HIV-1
QIGWMTNNPPIPVGE

SEQ ID NO: 3083 - protein, 9 aa, HIV-1
WMTNNPPIP

SEQ ID NO: 3084 - protein, 15 aa, HIV-1
QIIEQLIKKEKVYLA

SEQ ID NO: 3085 - protein, 9 aa, HIV-1
LIKKEKVYL

SEQ ID NO: 3086 - protein, 15 aa, HIV-1
QILGQLQPSLQTGSE

SEQ ID NO: 3087 - protein, 9 aa, HIV-1
GQLQPSLQT

SEQ ID NO: 3088 - protein, 15 aa, HIV-1
QILGQLQPSLQTGSE

SEQ ID NO: 3089 - protein, 9 aa, HIV-1
LGQLQPSLQ

SEQ ID NO: 3090 - protein, 15 aa, HIV-1
QILIEICGHKAIGTV

SEQ ID NO: 3091 - protein, 9 aa, HIV-1
ICGHKAIGT

SEQ ID NO: 3092 - protein, 15 aa, HIV-1
QITKIQNFRVYYRDS

SEQ ID NO: 3093 - protein, 9 aa, HIV-1
IQNFRVYYR

SEQ ID NO: 3094 - protein, 15 aa, HIV-1
QITKIQNFRVYYRDS

SEQ ID NO: 3095 - protein, 9 aa, HIV-1
ITKIQNFRV

SEQ ID NO: 3096 - protein, 15 aa, HIV-1
QIYPGIKVRQLCKLL

SEQ ID NO: 3097 - protein, 9 aa, HIV-1
YPGIKVRQL

SEQ ID NO: 3098 - protein, 15 aa, HIV-1
QIYQEPFKNLKTGKY

SEQ ID NO: 3099 - protein, 9 aa, HIV-1
IYQEPFKNL

SEQ ID NO: 3100 - protein, 15 aa, HIV-1
QIYQEPFKNLKTGKY

SEQ ID NO: 3101 - protein, 9 aa, HIV-1
PFKNLKTGK

SEQ ID NO: 3102 - protein, 15 aa, HIV-1
QIYQEPFKNLKTGKY

SEQ ID NO: 3103 - protein, 9 aa, HIV-1
YQEPFKNLK

SEQ ID NO: 3104 - protein, 15 aa, HIV-1
QKEPPFLWMGYELHP

SEQ ID NO: 3105 - protein, 9 aa, HIV-1
FLWMGYELH

SEQ ID NO: 3106 - protein, 15 aa, HIV-1
QKETWETWWTEYWQA

SEQ ID NO: 3107 - protein, 9 aa, HIV-1
WETWWTEYW

SEQ ID NO: 3108 - protein, 15 aa, HIV-1
QKLVGKLNWASQIYP

SEQ ID NO: 3109 - protein, 9 aa, HIV-1
KLNWASQIY

SEQ ID NO: 3110 - protein, 15 aa, HIV-1
QKLVGKLNWASQIYP

SEQ ID NO: 3111 - protein, 9 aa, HIV-1
LVGKLNWAS

SEQ ID NO: 3112 - protein, 15 aa, HIV-1
QKQITKIQNFRVYYR

SEQ ID NO: 3113 - protein, 9 aa, HIV-1
ITKIQNFRV

SEQ ID NO: 3114 - protein, 15 aa, HIV-1
QKQITKIQNFRVYYR

SEQ ID NO: 3115 - protein, 9 aa, HIV-1
TKIQNFRVY

SEQ ID NO: 3116 - protein, 15 aa, HIV-1
QKTELQAIYLALQDS

SEQ ID NO: 3117 - protein, 9 aa, HIV-1
LQAIYLALQ

SEQ ID NO: 3118 - protein, 15 aa, HIV-1
QKVVTLTDTTNQKTE

SEQ ID NO: 3119 - protein, 9 aa, HIV-1
LTDTTNQKT

SEQ ID NO: 3120 - protein, 15 aa, HIV-1
QKVVTLTDTTNQKTE

SEQ ID NO: 3121 - protein, 9 aa, HIV-1
VTLTDTTNQ

SEQ ID NO: 3122 - protein, 15 aa, HIV-1
QLCKLLRGTKALTEV

SEQ ID NO: 3123 - protein, 9 aa, HIV-1
LRGTKALTE

SEQ ID NO: 3124 - protein, 15 aa, HIV-1
QLEKEPIVGAETFYV

SEQ ID NO: 3125 - protein, 9 aa, HIV-1
LEKEPIVGA

SEQ ID NO: 3126 - protein, 15 aa, HIV-1
QLIKKEKVYLAWVPA

SEQ ID NO: 3127 - protein, 9 aa, HIV-1
IKKEKVYLA

SEQ ID NO: 3128 - protein, 15 aa, HIV-1
QLTEAVQKITTESIV

SEQ ID NO: 3129 - protein, 9 aa, HIV-1
VQKITTESI

SEQ ID NO: 3130 - protein, 15 aa, HIV-1
QMAVFIHNFKRKGGI

SEQ ID NO: 3131 - protein, 9 aa, HIV-1
FIHNFKRKG

SEQ ID NO: 3132 - protein, 15 aa, HIV-1
QMAVFIHNFKRKGGI

SEQ ID NO: 3133 - protein, 9 aa, HIV-1
VFIHNFKRK

SEQ ID NO: 3134 - protein, 15 aa, HIV-1
QMVHQAISPRTLNAW

SEQ ID NO: 3135 - protein, 9 aa, HIV-1
MVHQAISPR

SEQ ID NO: 3136 - protein, 15 aa, HIV-1
QMVHQAISPRTLNAW

SEQ ID NO: 3137 - protein, 9 aa, HIV-1
VHQAISPRT

SEQ ID NO: 3138 - protein, 15 aa, HIV-1
QNFRVYYRDSRNPLW

SEQ ID NO: 3139 - protein, 9 aa, HIV-1
FRVYYRDSR

SEQ ID NO: 3140 - protein, 15 aa, HIV-1
QNFRVYYRDSRNPLW

SEQ ID NO: 3141 - protein, 9 aa, HIV-1
YYRDSRNPL

SEQ ID NO: 3142 - protein, 15 aa, HIV-1
QNIQGQMVHQAISPR

SEQ ID NO: 3143 - protein, 9 aa, HIV-1
IQGQMVHQA

SEQ ID NO: 3144 - protein, 15 aa, HIV-1
QNYPIVQNIQGQMVH

SEQ ID NO: 3145 - protein, 9 aa, HIV-1
VQNIQGQMV

SEQ ID NO: 3146 - protein, 15 aa, HIV-1
QRGNFRNQRKIVKCF

SEQ ID NO: 3147 - protein, 9 aa, HIV-1
FRNQRKIVK

SEQ ID NO: 3148 - protein, 15 aa, HIV-1
QSESELVNQIIEQLI

SEQ ID NO: 3149 - protein, 9 aa, HIV-1
LVNQIIEQL

SEQ ID NO: 3150 - protein, 15 aa, HIV-1
QSSMTKILEPFRKQN

SEQ ID NO: 3151 - protein, 9 aa, HIV-1
TKILEPFRK

SEQ ID NO: 3152 - protein, 15 aa, HIV-1
QTGSEELRSLYNTVA

SEQ ID NO: 3153 - protein, 9 aa, HIV-1
SEELRSLYN

SEQ ID NO: 3154 - protein, 15 aa, HIV-1
QTKELQKQITKIQNF

SEQ ID NO: 3155 - protein, 9 aa, HIV-1
LQKQITKIQ

SEQ ID NO: 3156 - protein, 15 aa, HIV-1
QVDKLVSAGIRKVLF

SEQ ID NO: 3157 - protein, 9 aa, HIV-1
LVSAGIRKV

SEQ ID NO: 3158 - protein, 15 aa, HIV-1
QVTLWQRPLVTIKIG

SEQ ID NO: 3159 - protein, 9 aa, HIV-1
LWQRPLVTI

SEQ ID NO: 3160 - protein, 15 aa, HIV-1
QVTLWQRPLVTIKIG

SEQ ID NO: 3161 - protein, 9 aa, HIV-1
TLWQRPLVT

SEQ ID NO: 3162 - protein, 15 aa, HIV-1
QVTNSATIMMQRGNF

SEQ ID NO: 3163 - protein, 9 aa, HIV-1
VTNSATIMM

SEQ ID NO: 3164 - protein, 15 aa, HIV-1
QYALGIIQAQPDQSE

SEQ ID NO: 3165 - protein, 9 aa, HIV-1
IIQAQPDQS

SEQ ID NO: 3166 - protein, 15 aa, HIV-1
QYALGIIQAQPDQSE

SEQ ID NO: 3167 - protein, 9 aa, HIV-1
LGIIQAQPD

SEQ ID NO: 3168 - protein, 15 aa, HIV-1
QYMDDLYVGSDLEIG

SEQ ID NO: 3169 - protein, 9 aa, HIV-1
LYVGSDLEI

SEQ ID NO: 3170 - protein, 15 aa, HIV-1
RAMASDFNLPPVVAK

SEQ ID NO: 3171 - protein, 9 aa, HIV-1
DFNLPPVVA

SEQ ID NO: 3172 - protein, 15 aa, HIV-1
RAMASDFNLPPVVAK

SEQ ID NO: 3173 - protein, 9 aa, HIV-1
MASDFNLPP

SEQ ID NO: 3174 - protein, 15 aa, HIV-1
RDQAEHLKTAVQMAV

SEQ ID NO: 3175 - protein, 9 aa, HIV-1
HLKTAVQMA

SEQ ID NO: 3176 - protein, 15 aa, HIV-1
RDSRNPLWKGPAKLL

SEQ ID NO: 3177 - protein, 9 aa, HIV-1
PLWKGPAKL

SEQ ID NO: 3178 - protein, 15 aa, HIV-1
RDYVDRFYKTLRAEQ

SEQ ID NO: 3179 - protein, 9 aa, HIV-1
DRFYKTLRA

SEQ ID NO: 3180 - protein, 15 aa, HIV-1
RDYVDRFYKTLRAEQ

SEQ ID NO: 3181 - protein, 9 aa, HIV-1
DYVDRFYKT

SEQ ID NO: 3182 - protein, 15 aa, HIV-1
RDYVDRFYKTLRAEQ

SEQ ID NO: 3183 - protein, 9 aa, HIV-1
VDRFYKTLR

SEQ ID NO: 3184 - protein, 15 aa, HIV-1
REDLAFLQGKAREFS

SEQ ID NO: 3185 - protein, 9 aa, HIV-1
FLQGKAREF

SEQ ID NO: 3186 - protein, 15 aa, HIV-1
REDLAFLQGKAREFS

SEQ ID NO: 3187 - protein, 9 aa, HIV-1
LAFLQGKAR

SEQ ID NO: 3188 - protein, 15 aa, HIV-1
REFSSEQTRANSPTR

SEQ ID NO: 3189 - protein, 9 aa, HIV-1
FSSEQTRAN

SEQ ID NO: 3190 - protein, 15 aa, HIV-1
RELERFAVNPGLLET

SEQ ID NO: 3191 - protein, 9 aa, HIV-1
FAVNPGLLE

SEQ ID NO: 3192 - protein, 15 aa, HIV-1
RELERFAVNPGLLET

SEQ ID NO: 3193 - protein, 9 aa, HIV-1
LERFAVNPG

SEQ ID NO: 3194 - protein, 15 aa, HIV-1
RELQVWGRDNNSPSE

SEQ ID NO: 3195 - protein, 9 aa, HIV-1
WGRDNNSPS

SEQ ID NO: 3196 - protein, 15 aa, HIV-1
RFAVNPGLLETSEGC

SEQ ID NO: 3197 - protein, 9 aa, HIV-1
FAVNPGLLE

SEQ ID NO: 3198 - protein, 15 aa, HIV-1
RFAVNPGLLETSEGC

SEQ ID NO: 3199 - protein, 9 aa, HIV-1
VNPGLLETS

SEQ ID NO: 3200 - protein, 15 aa, HIV-1
RFYKTLRAEQASQEV

SEQ ID NO: 3201 - protein, 9 aa, HIV-1
FYKTLRAEQ

SEQ ID NO: 3202 - protein, 15 aa, HIV-1
RFYKTLRAEQASQEV

SEQ ID NO: 3203 - protein, 9 aa, HIV-1
YKTLRAEQA

SEQ ID NO: 3204 - protein, 15 aa, HIV-1
RGNFRNQRKIVKCFN

SEQ ID NO: 3205 - protein, 9 aa, HIV-1
FRNQRKIVK

SEQ ID NO: 3206 - protein, 15 aa, HIV-1
RGRQKVVTLTDTTNQ

SEQ ID NO: 3207 - protein, 9 aa, HIV-1
KVVTLTDTT

SEQ ID NO: 3208 - protein, 15 aa, HIV-1
RGRQKVVTLTDTTNQ

SEQ ID NO: 3209 - protein, 9 aa, HIV-1
RQKVVTLTD

SEQ ID NO: 3210 - protein, 15 aa, HIV-1
RGRQKVVTLTDTTNQ

SEQ ID NO: 3211 - protein, 9 aa, HIV-1
VVTLTDTTN

SEQ ID NO: 3212 - protein, 15 aa, HIV-1
RGSDIAGTTSTLQEQ

SEQ ID NO: 3213 - protein, 9 aa, HIV-1
IAGTTSTLQ

SEQ ID NO: 3214 - protein, 15 aa, HIV-1
RKLVDFRELNKRTQD

SEQ ID NO: 3215 - protein, 9 aa, HIV-1
FRELNKRTQ

SEQ ID NO: 3216 - protein, 15 aa, HIV-1
RKLVDFRELNKRTQD

SEQ ID NO: 3217 - protein, 9 aa, HIV-1
VDFRELNKR

SEQ ID NO: 3218 - protein, 15 aa, HIV-1
RKYTAFTIPSINNET

SEQ ID NO: 3219 - protein, 9 aa, HIV-1
YTAFTIPSI

SEQ ID NO: 3220 - protein, 15 aa, HIV-1
RMRGAHTNDVKQLTE

SEQ ID NO: 3221 - protein, 9 aa, HIV-1
MRGAHTNDV

SEQ ID NO: 3222 - protein, 15 aa, HIV-1
RMYSPTSILDIRQGP

SEQ ID NO: 3223 - protein, 9 aa, HIV-1
YSPTSILDI

SEQ ID NO: 3224 - protein, 15 aa, HIV-1
RNPLWKGPAKLLWKG

SEQ ID NO: 3225 - protein, 9 aa, HIV-1
LWKGPAKLL

SEQ ID NO: 3226 - protein, 15 aa, HIV-1
RQGTVSFNFPQVTLW

SEQ ID NO: 3227 - protein, 9 aa, HIV-1
VSFNFPQVT

SEQ ID NO: 3228 - protein, 15 aa, HIV-1
RQHLLRWGLTTPDKK

SEQ ID NO: 3229 - protein, 9 aa, HIV-1
LLRWGLTTP

SEQ ID NO: 3230 - protein, 15 aa, HIV-1
RQHLLRWGLTTPDKK

SEQ ID NO: 3231 - protein, 9 aa, HIV-1
LRWGLTTPD

SEQ ID NO: 3232 - protein, 15 aa, HIV-1
RQHLLRWGLTTPDKK

SEQ ID NO: 3233 - protein, 9 aa, HIV-1
RWGLTTPDK

SEQ ID NO: 3234 - protein, 15 aa, HIV-1
RQILGQLQPSLQTGS

SEQ ID NO: 3235 - protein, 9 aa, HIV-1
GQLQPSLQT

SEQ ID NO: 3236 - protein, 15 aa, HIV-1
RQILGQLQPSLQTGS

SEQ ID NO: 3237 - protein, 9 aa, HIV-1
LGQLQPSLQ

SEQ ID NO: 3238 - protein, 15 aa, HIV-1
RQKVVTLTDTTNQKT

SEQ ID NO: 3239 - protein, 9 aa, HIV-1
VTLTDTTNQ

SEQ ID NO: 3240 - protein, 15 aa, HIV-1
RQKVVTLTDTTNQKT

SEQ ID NO: 3241 - protein, 9 aa, HIV-1
VVTLTDTTN

SEQ ID NO: 3242 - protein, 15 aa, HIV-1
RQLCKLLRGTKALTE

SEQ ID NO: 3243 - protein, 9 aa, HIV-1
CKLLRGTKA

SEQ ID NO: 3244 - protein, 15 aa, HIV-1
RRELQVWGRDNNSPS

SEQ ID NO: 3245 - protein, 9 aa, HIV-1
LQVWGRDNN

SEQ ID NO: 3246 - protein, 15 aa, HIV-1
RSLYNTVATLYCVHQ

SEQ ID NO: 3247 - protein, 9 aa, HIV-1
LYNTVATLY

SEQ ID NO: 3248 - protein, 15 aa, HIV-1
RSLYNTVATLYCVHQ

SEQ ID NO: 3249 - protein, 9 aa, HIV-1
YNTVATLYC

SEQ ID NO: 3250 - protein, 15 aa, HIV-1
RTKIEELRQHLLRWG

SEQ ID NO: 3251 - protein, 9 aa, HIV-1
ELRQHLLRW

SEQ ID NO: 3252 - protein, 15 aa, HIV-1
RTKIEELRQHLLRWG

SEQ ID NO: 3253 - protein, 9 aa, HIV-1
IEELRQHLL

SEQ ID NO: 3254 - protein, 15 aa, HIV-1
RTLNAWVKVVEEKAF

SEQ ID NO: 3255 - protein, 9 aa, HIV-1
LNAWVKVVE

SEQ ID NO: 3256 - protein, 15 aa, HIV-1
RTLNAWVKVVEEKAF

SEQ ID NO: 3257 - protein, 9 aa, HIV-1
TLNAWVKVV

SEQ ID NO: 3258 - protein, 15 aa, HIV-1
RVHPVHAGPIAPGQM

SEQ ID NO: 3259 - protein, 9 aa, HIV-1
VHAGPIAPG

SEQ ID NO: 3260 - protein, 15 aa, HIV-1
RVLAEAMSQVTNSAT

SEQ ID NO: 3261 - protein, 9 aa, HIV-1
AMSQVTNSA

SEQ ID NO: 3262 - protein, 15 aa, HIV-1
RVLAEAMSQVTNSAT

SEQ ID NO: 3263 - protein, 9 aa, HIV-1
LAEAMSQVT

SEQ ID NO: 3264 - protein, 15 aa, HIV-1
RVYYRDSRNPLWKGP

SEQ ID NO: 3265 - protein, 9 aa, HIV-1
YRDSRNPLW

SEQ ID NO: 3266 - protein, 15 aa, HIV-1
RVYYRDSRNPLWKGP

SEQ ID NO: 3267 - protein, 9 aa, HIV-1
YYRDSRNPL

SEQ ID NO: 3268 - protein, 15 aa, HIV-1
RWGLTTPDKKHQKEP

SEQ ID NO: 3269 - protein, 9 aa, HIV-1
WGLTTPDKK

SEQ ID NO: 3270 - protein, 15 aa, HIV-1
RWIILGLNKIVRMYS

SEQ ID NO: 3271 - protein, 9 aa, HIV-1
ILGLNKIVR

SEQ ID NO: 3272 - protein, 15 aa, HIV-1
RWIILGLNKIVRMYS

SEQ ID NO: 3273 - protein, 9 aa, HIV-1
LGLNKIVRM

SEQ ID NO: 3274 - protein, 15 aa, HIV-1
RWIILGLNKIVRMYS

SEQ ID NO: 3275 - protein, 9 aa, HIV-1
WIILGLNKI

SEQ ID NO: 3276 - protein, 15 aa, HIV-1
RWPVKTIHTDNGSNF

SEQ ID NO: 3277 - protein, 9 aa, HIV-1
VKTIHTDNG

SEQ ID NO: 3278 - protein, 15 aa, HIV-1
SAGERIVDIIATDIQ

SEQ ID NO: 3279 - protein, 9 aa, HIV-1
IVDIIATDI

SEQ ID NO: 3280 - protein, 15 aa, HIV-1
SATIMMQRGNFRNQR

SEQ ID NO: 3281 - protein, 9 aa, HIV-1
IMMQRGNFR

SEQ ID NO: 3282 - protein, 15 aa, HIV-1
SCDKCQLKGEAMHGQ

SEQ ID NO: 3283 - protein, 9 aa, HIV-1
QLKGEAMHG

SEQ ID NO: 3284 - protein, 15 aa, HIV-1
SDFNLPPVVAKEIVA

SEQ ID NO: 3285 - protein, 9 aa, HIV-1
FNLPPVVAK

SEQ ID NO: 3286 - protein, 15 aa, HIV-1
SDIAGTTSTLQEQIG

SEQ ID NO: 3287 - protein, 9 aa, HIV-1
IAGTTSTLQ

SEQ ID NO: 3288 - protein, 15 aa, HIV-1
SDIKVVPRRKAKIIR

SEQ ID NO: 3289 - protein, 9 aa, HIV-1
IKVVPRRKA

SEQ ID NO: 3290 - protein, 15 aa, HIV-1
SDIKVVPRRKAKIIR

SEQ ID NO: 3291 - protein, 9 aa, HIV-1
VVPRRKAKI

SEQ ID NO: 3292 - protein, 15 aa, HIV-1
SEELRSLYNTVATLY

SEQ ID NO: 3293 - protein, 9 aa, HIV-1
LRSLYNTVA

SEQ ID NO: 3294 - protein, 15 aa, HIV-1
SELVNQIIEQLIKKE

SEQ ID NO: 3295 - protein, 9 aa, HIV-1
LVNQIIEQL

SEQ ID NO: 3296 - protein, 15 aa, HIV-1
SESELVNQIIEQLIK

SEQ ID NO: 3297 - protein, 9 aa, HIV-1
LVNQIIEQL

SEQ ID NO: 3298 - protein, 15 aa, HIV-1
SGLEVNIVTDSQYAL

SEQ ID NO: 3299 - protein, 9 aa, HIV-1
LEVNIVTDS

SEQ ID NO: 3300 - protein, 15 aa, HIV-1
SINNETPGIRYQYNV

SEQ ID NO: 3301 - protein, 9 aa, HIV-1
INNETPGIR

SEQ ID NO: 3302 - protein, 15 aa, HIV-1
SIVIWGKTPKFKLPI

SEQ ID NO: 3303 - protein, 9 aa, HIV-1
IVIWGKTPK

SEQ ID NO: 3304 - protein, 15 aa, HIV-1
SIVIWGKTPKFKLPI

SEQ ID NO: 3305 - protein, 9 aa, HIV-1
IWGKTPKFK

SEQ ID NO: 3306 - protein, 15 aa, HIV-1
SIVIWGKTPKFKLPI

SEQ ID NO: 3307 - protein, 9 aa, HIV-1
VIWGKTPKF

SEQ ID NO: 3308 - protein, 15 aa, HIV-1
SKIGPENPYNTPVFA

SEQ ID NO: 3309 - protein, 9 aa, HIV-1
IGPENPYNT

SEQ ID NO: 3310 - protein, 15 aa, HIV-1
SLYNTVATLYCVHQR

SEQ ID NO: 3311 - protein, 9 aa, HIV-1
LYNTVATLY

SEQ ID NO: 3312 - protein, 15 aa, HIV-1
SLYNTVATLYCVHQR

SEQ ID NO: 3313 - protein, 9 aa, HIV-1
YNTVATLYC

SEQ ID NO: 3314 - protein, 15 aa, HIV-1
SMNKELKKIIGQVRD

SEQ ID NO: 3315 - protein, 9 aa, HIV-1
LKKIIGQVR

SEQ ID NO: 3316 - protein, 15 aa, HIV-1
SMTKILEPFRKQNPD

SEQ ID NO: 3317 - protein, 9 aa, HIV-1
TKILEPFRK

SEQ ID NO: 3318 - protein, 15 aa, HIV-1
SNFTGATVRAACWWA

SEQ ID NO: 3319 - protein, 9 aa, HIV-1
FTGATVRAA

SEQ ID NO: 3320 - protein, 15 aa, HIV-1
SNWRAMASDFNLPPV

SEQ ID NO: 3321 - protein, 9 aa, HIV-1
MASDFNLPP

SEQ ID NO: 3322 - protein, 15 aa, HIV-1
SNWRAMASDFNLPPV

SEQ ID NO: 3323 - protein, 9 aa, HIV-1
WRAMASDFN

SEQ ID NO: 3324 - protein, 15 aa, HIV-1
SPAIFQSSMTKILEP

SEQ ID NO: 3325 - protein, 9 aa, HIV-1
FQSSMTKIL

SEQ ID NO: 3326 - protein, 15 aa, HIV-1
SPEVIPMFSALSEGA

SEQ ID NO: 3327 - protein, 9 aa, HIV-1
VIPMFSALS

SEQ ID NO: 3328 - protein, 15 aa, HIV-1
SPRTLNAWVKVVEEK

SEQ ID NO: 3329 - protein, 9 aa, HIV-1
LNAWVKVVE

SEQ ID NO: 3330 - protein, 15 aa, HIV-1
SPRTLNAWVKVVEEK

SEQ ID NO: 3331 - protein, 9 aa, HIV-1
TLNAWVKVV

SEQ ID NO: 3332 - protein, 15 aa, HIV-1
SQEVKNWMTETLLVQ

SEQ ID NO: 3333 - protein, 9 aa, HIV-1
VKNWMTETL

SEQ ID NO: 3334 - protein, 15 aa, HIV-1
SQIYPGIKVRQLCKL

SEQ ID NO: 3335 - protein, 9 aa, HIV-1
YPGIKVRQL

SEQ ID NO: 3336 - protein, 15 aa, HIV-1
SQNYPIVQNIQGQMV

SEQ ID NO: 3337 - protein, 9 aa, HIV-1
IVQNIQGQM

SEQ ID NO: 3338 - protein, 15 aa, HIV-1
SQNYPIVQNIQGQMV

SEQ ID NO: 3339 - protein, 9 aa, HIV-1
SQNYPIVQN

SEQ ID NO: 3340 - protein, 15 aa, HIV-1
SQVTNSATIMMQRGN

SEQ ID NO: 3341 - protein, 9 aa, HIV-1
VTNSATIMM

SEQ ID NO: 3342 - protein, 15 aa, HIV-1
SQYALGIIQAQPDQS

SEQ ID NO: 3343 - protein, 9 aa, HIV-1
LGIIQAQPD

SEQ ID NO: 3344 - protein, 15 aa, HIV-1
SQYALGIIQAQPDQS

SEQ ID NO: 3345 - protein, 9 aa, HIV-1
YALGIIQAQ

SEQ ID NO: 3346 - protein, 15 aa, HIV-1
SRELERFAVNPGLLE

SEQ ID NO: 3347 - protein, 9 aa, HIV-1
LERFAVNPG

SEQ ID NO: 3348 - protein, 15 aa, HIV-1
SRNPLWKGPAKLLWK

SEQ ID NO: 3349 - protein, 9 aa, HIV-1
LWKGPAKLL

SEQ ID NO: 3350 - protein, 15 aa, HIV-1
SSEQTRANSPTRREL

SEQ ID NO: 3351 - protein, 9 aa, HIV-1
QTRANSPTR

SEQ ID NO: 3352 - protein, 15 aa, HIV-1
SSMTKILEPFRKQNP

SEQ ID NO: 3353 - protein, 9 aa, HIV-1
TKILEPFRK

SEQ ID NO: 3354 - protein, 15 aa, HIV-1
STLQEQIGWMTNNPP

SEQ ID NO: 3355 - protein, 9 aa, HIV-1
LQEQIGWMT

SEQ ID NO: 3356 - protein, 15 aa, HIV-1
STLQEQIGWMTNNPP

SEQ ID NO: 3357 - protein, 9 aa, HIV-1
QIGWMTNNP

SEQ ID NO: 3358 - protein, 15 aa, HIV-1
SWTVNDIQKLVGKLN

SEQ ID NO: 3359 - protein, 9 aa, HIV-1
VNDIQKLVG

SEQ ID NO: 3360 - protein, 15 aa, HIV-1
TAVQMAVFIHNFKRK

SEQ ID NO: 3361 - protein, 9 aa, HIV-1
VQMAVFIHN

SEQ ID NO: 3362 - protein, 15 aa, HIV-1
TAYFLLKLAGRWPVK

SEQ ID NO: 3363 - protein, 9 aa, HIV-1
FLLKLAGRW

SEQ ID NO: 3364 - protein, 15 aa, HIV-1
TAYFLLKLAGRWPVK

SEQ ID NO: 3365 - protein, 9 aa, HIV-1
LKLAGRWPV

SEQ ID NO: 3366 - protein, 15 aa, HIV-1
TAYFLLKLAGRWPVK

SEQ ID NO: 3367 - protein, 9 aa, HIV-1
YFLLKLAGR

SEQ ID NO: 3368 - protein, 15 aa, HIV-1
TDIQTKELQKQITKI

SEQ ID NO: 3369 - protein, 9 aa, HIV-1
IQTKELQKQ

SEQ ID NO: 3370 - protein, 15 aa, HIV-1
TDNGSNFTGATVRAA

SEQ ID NO: 3371 - protein, 9 aa, HIV-1
NFTGATVRA

SEQ ID NO: 3372 - protein, 15 aa, HIV-1
TDSQYALGIIQAQPD

SEQ ID NO: 3373 - protein, 9 aa, HIV-1
YALGIIQAQ

SEQ ID NO: 3374 - protein, 15 aa, HIV-1
TEAVQKITTESIVIW

SEQ ID NO: 3375 - protein, 9 aa, HIV-1
VQKITTESI

SEQ ID NO: 3376 - protein, 15 aa, HIV-1
TEEKIKALVEICTEM

SEQ ID NO: 3377 - protein, 9 aa, HIV-1
IKALVEICT

SEQ ID NO: 3378 - protein, 15 aa, HIV-1
TELQAIYLALQDSGL

SEQ ID NO: 3379 - protein, 9 aa, HIV-1
LQAIYLALQ

SEQ ID NO: 3380 - protein, 15 aa, HIV-1
TESIVIWGKTPKFKL

SEQ ID NO: 3381 - protein, 9 aa, HIV-1
IVIWGKTPK

SEQ ID NO: 3382 - protein, 15 aa, HIV-1
TESIVIWGKTPKFKL

SEQ ID NO: 3383 - protein, 9 aa, HIV-1
IWGKTPKFK

SEQ ID NO: 3384 - protein, 15 aa, HIV-1
TESIVIWGKTPKFKL

SEQ ID NO: 3385 - protein, 9 aa, HIV-1
VIWGKTPKF

SEQ ID NO: 3386 - protein, 15 aa, HIV-1
TETLLVQNANPDCKT

SEQ ID NO: 3387 - protein, 9 aa, HIV-1
VQNANPDCK

SEQ ID NO: 3388 - protein, 15 aa, HIV-1
TEYWQATWIPEWEFV

SEQ ID NO: 3389 - protein, 9 aa, HIV-1
WQATWIPEW

SEQ ID NO: 3390 - protein, 15 aa, HIV-1
TFYVDGAANRETKLG

SEQ ID NO: 3391 - protein, 9 aa, HIV-1
YVDGAANRE

SEQ ID NO: 3392 - protein, 15 aa, HIV-1
TGATVRAACWWAGIK

SEQ ID NO: 3393 - protein, 9 aa, HIV-1
VRAACWWAG

SEQ ID NO: 3394 - protein, 15 aa, HIV-1
TGKYARMRGAHTNDV

SEQ ID NO: 3395 - protein, 9 aa, HIV-1
YARMRGAHT

SEQ ID NO: 3396 - protein, 15 aa, HIV-1
TGQETAYFLLKLAGR

SEQ ID NO: 3397 - protein, 9 aa, HIV-1
TAYFLLKLA

SEQ ID NO: 3398 - protein, 15 aa, HIV-1
TGSEELRSLYNTVAT

SEQ ID NO: 3399 - protein, 9 aa, HIV-1
LRSLYNTVA

SEQ ID NO: 3400 - protein, 15 aa, HIV-1
THLEGKVILVAVHVA

SEQ ID NO: 3401 - protein, 9 aa, HIV-1
KVILVAVHV

SEQ ID NO: 3402 - protein, 15 aa, HIV-1
TILKALGPAATLEEM

SEQ ID NO: 3403 - protein, 9 aa, HIV-1
LKALGPAAT

SEQ ID NO: 3404 - protein, 15 aa, HIV-1
TIMMQRGNFRNQRKI

SEQ ID NO: 3405 - protein, 9 aa, HIV-1
IMMQRGNFR

SEQ ID NO: 3406 - protein, 15 aa, HIV-1
TIPSINNETPGIRYQ

SEQ ID NO: 3407 - protein, 9 aa, HIV-1
INNETPGIR

SEQ ID NO: 3408 - protein, 15 aa, HIV-1
TKELQKQITKIQNFR

SEQ ID NO: 3409 - protein, 9 aa, HIV-1
LQKQITKIQ

SEQ ID NO: 3410 - protein, 15 aa, HIV-1
TKIEELRQHLLRWGL

SEQ ID NO: 3411 - protein, 9 aa, HIV-1
LRQHLLRWG

SEQ ID NO: 3412 - protein, 15 aa, HIV-1
TKILEPFRKQNPDIV

SEQ ID NO: 3413 - protein, 9 aa, HIV-1
TKILEPFRK

SEQ ID NO: 3414 - protein, 15 aa, HIV-1
TKIQNFRVYYRDSRN

SEQ ID NO: 3415 - protein, 9 aa, HIV-1
IQNFRVYYR

SEQ ID NO: 3416 - protein, 15 aa, HIV-1
TKWRKLVDFRELNKR

SEQ ID NO: 3417 - protein, 9 aa, HIV-1
WRKLVDFRE

SEQ ID NO: 3418 - protein, 15 aa, HIV-1
TLEEMMTACQGVGGP

SEQ ID NO: 3419 - protein, 9 aa, HIV-1
MTACQGVGG

SEQ ID NO: 3420 - protein, 15 aa, HIV-1
TLLVQNANPDCKTIL

SEQ ID NO: 3421 - protein, 9 aa, HIV-1
VQNANPDCK

SEQ ID NO: 3422 - protein, 15 aa, HIV-1
TLNAWVKVVEEKAFS

SEQ ID NO: 3423 - protein, 9 aa, HIV-1
LNAWVKVVE

SEQ ID NO: 3424 - protein, 15 aa, HIV-1
TLNFPISPIETVPVK

SEQ ID NO: 3425 - protein, 9 aa, HIV-1
ISPIETVPV

SEQ ID NO: 3426 - protein, 15 aa, HIV-1
TLQEQIGWMTNNPPI

SEQ ID NO: 3427 - protein, 9 aa, HIV-1
IGWMTNNPP

SEQ ID NO: 3428 - protein, 15 aa, HIV-1
TLWQRPLVTIKIGGQ

SEQ ID NO: 3429 - protein, 9 aa, HIV-1
LWQRPLVTI

SEQ ID NO: 3430 - protein, 15 aa, HIV-1
TMLNTVGGHQAAMQM

SEQ ID NO: 3431 - protein, 9 aa, HIV-1
MLNTVGGHQ

SEQ ID NO: 3432 - protein, 15 aa, HIV-1
TMLNTVGGHQAAMQM

SEQ ID NO: 3433 - protein, 9 aa, HIV-1
VGGHQAAMQ

SEQ ID NO: 3434 - protein, 15 aa, HIV-1
TNQKTELQAIYLALQ

SEQ ID NO: 3435 - protein, 9 aa, HIV-1
KTELQAIYL

SEQ ID NO: 3436 - protein, 15 aa, HIV-1
TNSATIMMQRGNFRN

SEQ ID NO: 3437 - protein, 9 aa, HIV-1
IMMQRGNFR

SEQ ID NO: 3438 - protein, 15 aa, HIV-1
TPGIRYQYNVLPQGW

SEQ ID NO: 3439 - protein, 9 aa, HIV-1
IRYQYNVLP

SEQ ID NO: 3440 - protein, 15 aa, HIV-1
TPGIRYQYNVLPQGW

SEQ ID NO: 3441 - protein, 9 aa, HIV-1
YQYNVLPQG

SEQ ID NO: 3442 - protein, 15 aa, HIV-1
TPPLVKLWYQLEKEP

SEQ ID NO: 3443 - protein, 9 aa, HIV-1
VKLWYQLEK

SEQ ID NO: 3444 - protein, 15 aa, HIV-1
TPQDLNTMLNTVGGH

SEQ ID NO: 3445 - protein, 9 aa, HIV-1
LNTMLNTVG

SEQ ID NO: 3446 - protein, 15 aa, HIV-1
TPVFAIKKKDSTKWR

SEQ ID NO: 3447 - protein, 9 aa, HIV-1
IKKKDSTKW

SEQ ID NO: 3448 - protein, 15 aa, HIV-1
TPVFAIKKKDSTKWR

SEQ ID NO: 3449 - protein, 9 aa, HIV-1
VFAIKKKDS

SEQ ID NO: 3450 - protein, 15 aa, HIV-1
TPVNIIGRNLLTQIG

SEQ ID NO: 3451 - protein, 9 aa, HIV-1
IGRNLLTQI

SEQ ID NO: 3452 - protein, 15 aa, HIV-1
TPVNIIGRNLLTQIG

SEQ ID NO: 3453 - protein, 9 aa, HIV-1
VNIIGRNLL

SEQ ID NO: 3454 - protein, 15 aa, HIV-1
TQDFWEVQLGIPHPA

SEQ ID NO: 3455 - protein, 9 aa, HIV-1
EVQLGIPHP

SEQ ID NO: 3456 - protein, 15 aa, HIV-1
TSTLQEQIGWMTNNP

SEQ ID NO: 3457 - protein, 9 aa, HIV-1
LQEQIGWMT

SEQ ID NO: 3458 - protein, 15 aa, HIV-1
TTESIVIWGKTPKFK

SEQ ID NO: 3459 - protein, 9 aa, HIV-1
IVIWGKTPK

SEQ ID NO: 3460 - protein, 15 aa, HIV-1
TTESIVIWGKTPKFK

SEQ ID NO: 3461 - protein, 9 aa, HIV-1
VIWGKTPKF

SEQ ID NO: 3462 - protein, 15 aa, HIV-1
TTSTLQEQIGWMTNN

SEQ ID NO: 3463 - protein, 9 aa, HIV-1
LQEQIGWMT

SEQ ID NO: 3464 - protein, 15 aa, HIV-1
TVGGHQAAMQMLKET

SEQ ID NO: 3465 - protein, 9 aa, HIV-1
VGGHQAAMQ

SEQ ID NO: 3466 - protein, 15 aa, HIV-1
TVLDVGDAYFSVPLD

SEQ ID NO: 3467 - protein, 9 aa, HIV-1
LDVGDAYFS

SEQ ID NO: 3468 - protein, 15 aa, HIV-1
TVLEEMSLPGRWKPK

SEQ ID NO: 3469 - protein, 9 aa, HIV-1
LEEMSLPGR

SEQ ID NO: 3470 - protein, 15 aa, HIV-1
TVLVGPTPVNIIGRN

SEQ ID NO: 3471 - protein, 9 aa, HIV-1
LVGPTPVNI

SEQ ID NO: 3472 - protein, 15 aa, HIV-1
TVNDIQKLVGKLNWA

SEQ ID NO: 3473 - protein, 9 aa, HIV-1
IQKLVGKLN

SEQ ID NO: 3474 - protein, 15 aa, HIV-1
TVPVKLKPGMDGPKV

SEQ ID NO: 3475 - protein, 9 aa, HIV-1
VKLKPGMDG

SEQ ID NO: 3476 - protein, 15 aa, HIV-1
TVRAACWWAGIKQEF

SEQ ID NO: 3477 - protein, 9 aa, HIV-1
VRAACWWAG

SEQ ID NO: 3478 - protein, 15 aa, HIV-1
TWETWWTEYWQATWI

SEQ ID NO: 3479 - protein, 9 aa, HIV-1
WETWWTEYW

SEQ ID NO: 3480 - protein, 15 aa, HIV-1
TWIPEWEFVNTPPLV

SEQ ID NO: 3481 - protein, 9 aa, HIV-1
WEFVNTPPL

SEQ ID NO: 3482 - protein, 15 aa, HIV-1
TWWTEYWQATWIPEW

SEQ ID NO: 3483 - protein, 9 aa, HIV-1
EYWQATWIP

SEQ ID NO: 3484 - protein, 15 aa, HIV-1
VDGAANRETKLGKAG

SEQ ID NO: 3485 - protein, 9 aa, HIV-1
VDGAANRET

SEQ ID NO: 3486 - protein, 15 aa, HIV-1
VDKLVSAGIRKVLFL

SEQ ID NO: 3487 - protein, 9 aa, HIV-1
LVSAGIRKV

SEQ ID NO: 3488 - protein, 15 aa, HIV-1
VDRFYKTLRAEQASQ

SEQ ID NO: 3489 - protein, 9 aa, HIV-1
DRFYKTLRA

SEQ ID NO: 3490 - protein, 15 aa, HIV-1
VDRFYKTLRAEQASQ

SEQ ID NO: 3491 - protein, 9 aa, HIV-1
FYKTLRAEQ

SEQ ID NO: 3492 - protein, 15 aa, HIV-1
VDRFYKTLRAEQASQ

SEQ ID NO: 3493 - protein, 9 aa, HIV-1
YKTLRAEQA

SEQ ID NO: 3494 - protein, 15 aa, HIV-1
VFAIKKKDSTKWRKL

SEQ ID NO: 3495 - protein, 9 aa, HIV-1
IKKKDSTKW

SEQ ID NO: 3496 - protein, 15 aa, HIV-1
VFIHNFKRKGGIGGY

SEQ ID NO: 3497 - protein, 9 aa, HIV-1
FKRKGGIGG

SEQ ID NO: 3498 - protein, 15 aa, HIV-1
VFIHNFKRKGGIGGY

SEQ ID NO: 3499 - protein, 9 aa, HIV-1
IHNFKRKGG

SEQ ID NO: 3500 - protein, 15 aa, HIV-1
VGAETFYVDGAANRE

SEQ ID NO: 3501 - protein, 9 aa, HIV-1
FYVDGAANR

SEQ ID NO: 3502 - protein, 15 aa, HIV-1
VGDAYFSVPLDEDFR

SEQ ID NO: 3503 - protein, 9 aa, HIV-1
YFSVPLDED

SEQ ID NO: 3504 - protein, 15 aa, HIV-1
VGEIYKRWIILGLNK

SEQ ID NO: 3505 - protein, 9 aa, HIV-1
YKRWIILGL

SEQ ID NO: 3506 - protein, 15 aa, HIV-1
VGGHQAAMQMLKETI

SEQ ID NO: 3507 - protein, 9 aa, HIV-1
VGGHQAAMQ

SEQ ID NO: 3508 - protein, 15 aa, HIV-1
VGKLNWASQIYPGIK

SEQ ID NO: 3509 - protein, 9 aa, HIV-1
KLNWASQIY

SEQ ID NO: 3510 - protein, 15 aa, HIV-1
VGPTPVNIIGRNLLT

SEQ ID NO: 3511 - protein, 9 aa, HIV-1
VNIIGRNLL

SEQ ID NO: 3512 - protein, 15 aa, HIV-1
VHAGPIAPGQMREPR

SEQ ID NO: 3513 - protein, 9 aa, HIV-1
VHAGPIAPG

SEQ ID NO: 3514 - protein, 15 aa, HIV-1
VHPVHAGPIAPGQMR

SEQ ID NO: 3515 - protein, 9 aa, HIV-1
VHAGPIAPG

SEQ ID NO: 3516 - protein, 15 aa, HIV-1
VHQAISPRTLNAWVK

SEQ ID NO: 3517 - protein, 9 aa, HIV-1
VHQAISPRT

SEQ ID NO: 3518 - protein, 15 aa, HIV-1
VILVAVHVASGYIEA

SEQ ID NO: 3519 - protein, 9 aa, HIV-1
LVAVHVASG

SEQ ID NO: 3520 - protein, 15 aa, HIV-1
VIPMFSALSEGATPQ

SEQ ID NO: 3521 - protein, 9 aa, HIV-1
MFSALSEGA

SEQ ID NO: 3522 - protein, 15 aa, HIV-1
VIPMFSALSEGATPQ

SEQ ID NO: 3523 - protein, 9 aa, HIV-1
VIPMFSALS

SEQ ID NO: 3524 - protein, 15 aa, HIV-1
VIYQYMDDLYVGSDL

SEQ ID NO: 3525 - protein, 9 aa, HIV-1
YQYMDDLYV

SEQ ID NO: 3526 - protein, 15 aa, HIV-1
VKLKPGMDGPKVKQW

SEQ ID NO: 3527 - protein, 9 aa, HIV-1
VKLKPGMDG

SEQ ID NO: 3528 - protein, 15 aa, HIV-1
VKLWYQLEKEPIVGA

SEQ ID NO: 3529 - protein, 9 aa, HIV-1
VKLWYQLEK

SEQ ID NO: 3530 - protein, 15 aa, HIV-1
VKNWMTETLLVQNAN

SEQ ID NO: 3531 - protein, 9 aa, HIV-1
NWMTETLLV

SEQ ID NO: 3532 - protein, 15 aa, HIV-1
VKNWMTETLLVQNAN

SEQ ID NO: 3533 - protein, 9 aa, HIV-1
WMTETLLVQ

SEQ ID NO: 3534 - protein, 15 aa, HIV-1
VKQWPLTEEKIKALV

SEQ ID NO: 3535 - protein, 9 aa, HIV-1
VKQWPLTEE

SEQ ID NO: 3536 - protein, 15 aa, HIV-1
VLAEAMSQVTNSATI

SEQ ID NO: 3537 - protein, 9 aa, HIV-1
AMSQVTNSA

SEQ ID NO: 3538 - protein, 15 aa, HIV-1
VLAEAMSQVTNSATI

SEQ ID NO: 3539 - protein, 9 aa, HIV-1
LAEAMSQVT

SEQ ID NO: 3540 - protein, 15 aa, HIV-1
VLEEMSLPGRWKPKM

SEQ ID NO: 3541 - protein, 9 aa, HIV-1
LEEMSLPGR

SEQ ID NO: 3542 - protein, 15 aa, HIV-1
VLPQGWKGSPAIFQS

SEQ ID NO: 3543 - protein, 9 aa, HIV-1
WKGSPAIFQ

SEQ ID NO: 3544 - protein, 15 aa, HIV-1
VLVGPTPVNIIGRNL

SEQ ID NO: 3545 - protein, 9 aa, HIV-1
LVGPTPVNI

SEQ ID NO: 3546 - protein, 15 aa, HIV-1
VNDIQKLVGKLNWAS

SEQ ID NO: 3547 - protein, 9 aa, HIV-1
IQKLVGKLN

SEQ ID NO: 3548 - protein, 15 aa, HIV-1
VNDIQKLVGKLNWAS

SEQ ID NO: 3549 - protein, 9 aa, HIV-1
KLVGKLNWA

SEQ ID NO: 3550 - protein, 15 aa, HIV-1
VNIIGRNLLTQIGCT

SEQ ID NO: 3551 - protein, 9 aa, HIV-1
GRNLLTQIG

SEQ ID NO: 3552 - protein, 15 aa, HIV-1
VNIIGRNLLTQIGCT

SEQ ID NO: 3553 - protein, 9 aa, HIV-1
VNIIGRNLL

SEQ ID NO: 3554 - protein, 15 aa, HIV-1
VNTPPLVKLWYQLEK

SEQ ID NO: 3555 - protein, 9 aa, HIV-1
LVKLWYQLE

SEQ ID NO: 3556 - protein, 15 aa, HIV-1
VNTPPLVKLWYQLEK

SEQ ID NO: 3557 - protein, 9 aa, HIV-1
VNTPPLVKL

SEQ ID NO: 3558 - protein, 15 aa, HIV-1
VPLDEDFRKYTAFTI

SEQ ID NO: 3559 - protein, 9 aa, HIV-1
DFRKYTAFT

SEQ ID NO: 3560 - protein, 15 aa, HIV-1
VPVKLKPGMDGPKVK

SEQ ID NO: 3561 - protein, 9 aa, HIV-1
VKLKPGMDG

SEQ ID NO: 3562 - protein, 15 aa, HIV-1
VQKITTESIVIWGKT

SEQ ID NO: 3563 - protein, 9 aa, HIV-1
VQKITTESI

SEQ ID NO: 3564 - protein, 15 aa, HIV-1
VQLGIPHPAGLKKKK

SEQ ID NO: 3565 - protein, 9 aa, HIV-1
VQLGIPHPA

SEQ ID NO: 3566 - protein, 15 aa, HIV-1
VQMAVFIHNFKRKGG

SEQ ID NO: 3567 - protein, 9 aa, HIV-1
FIHNFKRKG

SEQ ID NO: 3568 - protein, 15 aa, HIV-1
VQMAVFIHNFKRKGG

SEQ ID NO: 3569 - protein, 9 aa, HIV-1
MAVFIHNFK

SEQ ID NO: 3570 - protein, 15 aa, HIV-1
VQMAVFIHNFKRKGG

SEQ ID NO: 3571 - protein, 9 aa, HIV-1
VFIHNFKRK

SEQ ID NO: 3572 - protein, 15 aa, HIV-1
VQNIQGQMVHQAISP

SEQ ID NO: 3573 - protein, 9 aa, HIV-1
IQGQMVHQA

SEQ ID NO: 3574 - protein, 15 aa, HIV-1
VRMYSPTSILDIRQG

SEQ ID NO: 3575 - protein, 9 aa, HIV-1
MYSPTSILD

SEQ ID NO: 3576 - protein, 15 aa, HIV-1
VRMYSPTSILDIRQG

SEQ ID NO: 3577 - protein, 9 aa, HIV-1
VRMYSPTSI

SEQ ID NO: 3578 - protein, 15 aa, HIV-1
VRMYSPTSILDIRQG

SEQ ID NO: 3579 - protein, 9 aa, HIV-1
YSPTSILDI

SEQ ID NO: 3580 - protein, 15 aa, HIV-1
VRQLCKLLRGTKALT

SEQ ID NO: 3581 - protein, 9 aa, HIV-1
CKLLRGTKA

SEQ ID NO: 3582 - protein, 15 aa, HIV-1
VRQLCKLLRGTKALT

SEQ ID NO: 3583 - protein, 9 aa, HIV-1
VRQLCKLLR

SEQ ID NO: 3584 - protein, 15 aa, HIV-1
VRAACWWAGIKQEFG

SEQ ID NO: 3585 - protein, 9 aa, HIV-1
VRAACWWAG

SEQ ID NO: 3586 - protein, 15 aa, HIV-1
VTDSQYALGIIQAQP

SEQ ID NO: 3587 - protein, 9 aa, HIV-1
YALGIIQAQ

SEQ ID NO: 3588 - protein, 15 aa, HIV-1
VTLWQRPLVTIKIGG

SEQ ID NO: 3589 - protein, 9 aa, HIV-1
LWQRPLVTI

SEQ ID NO: 3590 - protein, 15 aa, HIV-1
VTNRGRQKVVTLTDT

SEQ ID NO: 3591 - protein, 9 aa, HIV-1
VTNRGRQKV

SEQ ID NO: 3592 - protein, 15 aa, HIV-1
VTNSATIMMQRGNFR

SEQ ID NO: 3593 - protein, 9 aa, HIV-1
SATIMMQRG

SEQ ID NO: 3594 - protein, 15 aa, HIV-1
VTNSATIMMQRGNFR

SEQ ID NO: 3595 - protein, 9 aa, HIV-1
VTNSATIMM

SEQ ID NO: 3596 - protein, 15 aa, HIV-1
VTVLDVGDAYFSVPL

SEQ ID NO: 3597 - protein, 9 aa, HIV-1
LDVGDAYFS

SEQ ID NO: 3598 - protein, 15 aa, HIV-1
VVAKEIVASCDKCQL

SEQ ID NO: 3599 - protein, 9 aa, HIV-1
VVAKEIVAS

SEQ ID NO: 3600 - protein, 15 aa, HIV-1
VYLAWVPAHKGIGGN

SEQ ID NO: 3601 - protein, 9 aa, HIV-1
LAWVPAHKG

SEQ ID NO: 3602 - protein, 15 aa, HIV-1
VYLAWVPAHKGIGGN

SEQ ID NO: 3603 - protein, 9 aa, HIV-1
WVPAHKGIG

SEQ ID NO: 3604 - protein, 15 aa, HIV-1
VYLAWVPAHKGIGGN

SEQ ID NO: 3605 - protein, 9 aa, HIV-1
YLAWVPAHK

SEQ ID NO: 3606 - protein, 15 aa, HIV-1
VYYRDSRNPLWKGPA

SEQ ID NO: 3607 - protein, 9 aa, HIV-1
YRDSRNPLW

SEQ ID NO: 3608 - protein, 15 aa, HIV-1
WASQIYPGIKVRQLC

SEQ ID NO: 3609 - protein, 9 aa, HIV-1
YPGIKVRQL

SEQ ID NO: 3610 - protein, 15 aa, HIV-1
WDRVHPVHAGPIAPG

SEQ ID NO: 3611 - protein, 9 aa, HIV-1
VHPVHAGPI

SEQ ID NO: 3612 - protein, 15 aa, HIV-1
WEFVNTPPLVKLWYQ

SEQ ID NO: 3613 - protein, 9 aa, HIV-1
FVNTPPLVK

SEQ ID NO: 3614 - protein, 15 aa, HIV-1
WEFVNTPPLVKLWYQ

SEQ ID NO: 3615 - protein, 9 aa, HIV-1
VNTPPLVKL

SEQ ID NO: 3616 - protein, 15 aa, HIV-1
WEFVNTPPLVKLWYQ

SEQ ID NO: 3617 - protein, 9 aa, HIV-1
WEFVNTPPL

SEQ ID NO: 3618 - protein, 15 aa, HIV-1
WETWWTEYWQATWIP

SEQ ID NO: 3619 - protein, 9 aa, HIV-1
WETWWTEYW

SEQ ID NO: 3620 - protein, 15 aa, HIV-1
WETWWTEYWQATWIP

SEQ ID NO: 3621 - protein, 9 aa, HIV-1
WWTEYWQAT

SEQ ID NO: 3622 - protein, 15 aa, HIV-1
WEVQLGIPHPAGLKK

SEQ ID NO: 3623 - protein, 9 aa, HIV-1
VQLGIPHPA

SEQ ID NO: 3624 - protein, 15 aa, HIV-1
WIILGLNKIVRMYSP

SEQ ID NO: 3625 - protein, 9 aa, HIV-1
ILGLNKIVR

SEQ ID NO: 3626 - protein, 15 aa, HIV-1
WIILGLNKIVRMYSP

SEQ ID NO: 3627 - protein, 9 aa, HIV-1
LGLNKIVRM

SEQ ID NO: 3628 - protein, 15 aa, HIV-1
WIILGLNKIVRMYSP

SEQ ID NO: 3629 - protein, 9 aa, HIV-1
LNKIVRMYS

SEQ ID NO: 3630 - protein, 15 aa, HIV-1
WIILGLNKIVRMYSP

SEQ ID NO: 3631 - protein, 9 aa, HIV-1
WIILGLNKI

SEQ ID NO: 3632 - protein, 15 aa, HIV-1
WIPEWEFVNTPPLVK

SEQ ID NO: 3633 - protein, 9 aa, HIV-1
EFVNTPPLV

SEQ ID NO: 3634 - protein, 15 aa, HIV-1
WIPEWEFVNTPPLVK

SEQ ID NO: 3635 - protein, 9 aa, HIV-1
WEFVNTPPL

SEQ ID NO: 3636 - protein, 15 aa, HIV-1
WKGEGAVVIQDNSDI

SEQ ID NO: 3637 - protein, 9 aa, HIV-1
WKGEGAVVI

SEQ ID NO: 3638 - protein, 15 aa, HIV-1
WKGSPAIFQSSMTKI

SEQ ID NO: 3639 - protein, 9 aa, HIV-1
WKGSPAIFQ

SEQ ID NO: 3640 - protein, 15 aa, HIV-1
WMTNNPPIPVGEIYK

SEQ ID NO: 3641 - protein, 9 aa, HIV-1
MTNNPPIPV

SEQ ID NO: 3642 - protein, 15 aa, HIV-1
WPVKTIHTDNGSNFT

SEQ ID NO: 3643 - protein, 9 aa, HIV-1
VKTIHTDNG

SEQ ID NO: 3644 - protein, 15 aa, HIV-1
WQATWIPEWEFVNTP

SEQ ID NO: 3645 - protein, 9 aa, HIV-1
ATWIPEWEF

SEQ ID NO: 3646 - protein, 15 aa, HIV-1
WRAMASDFNLPPVVA

SEQ ID NO: 3647 - protein, 9 aa, HIV-1
MASDFNLPP

SEQ ID NO: 3648 - protein, 15 aa, HIV-1
WRAMASDFNLPPVVA

SEQ ID NO: 3649 - protein, 9 aa, HIV-1
WRAMASDFN

SEQ ID NO: 3650 - protein, 15 aa, HIV-1
WRKLVDFRELNKRTQ

SEQ ID NO: 3651 - protein, 9 aa, HIV-1
VDFRELNKR

SEQ ID NO: 3652 - protein, 15 aa, HIV-1
WTEYWQATWIPEWEF

SEQ ID NO: 3653 - protein, 9 aa, HIV-1
WQATWIPEW

SEQ ID NO: 3654 - protein, 15 aa, HIV-1
WTVNDIQKLVGKLNW

SEQ ID NO: 3655 - protein, 9 aa, HIV-1
IQKLVGKLN

SEQ ID NO: 3656 - protein, 15 aa, HIV-1
WTVQPIVLPEKDSWT

SEQ ID NO: 3657 - protein, 9 aa, HIV-1
WTVQPIVLP

SEQ ID NO: 3658 - protein, 15 aa, HIV-1
WWTEYWQATWIPEWE

SEQ ID NO: 3659 - protein, 9 aa, HIV-1
EYWQATWIP

SEQ ID NO: 3660 - protein, 15 aa, HIV-1
YALGIIQAQPDQSES

SEQ ID NO: 3661 - protein, 9 aa, HIV-1
IIQAQPDQS

SEQ ID NO: 3662 - protein, 15 aa, HIV-1
YALGIIQAQPDQSES

SEQ ID NO: 3663 - protein, 9 aa, HIV-1
IQAQPDQSE

SEQ ID NO: 3664 - protein, 15 aa, HIV-1
YARMRGAHTNDVKQL

SEQ ID NO: 3665 - protein, 9 aa, HIV-1
MRGAHTNDV

SEQ ID NO: 3666 - protein, 15 aa, HIV-1
YFLLKLAGRWPVKTI

SEQ ID NO: 3667 - protein, 9 aa, HIV-1
LAGRWPVKT

SEQ ID NO: 3668 - protein, 15 aa, HIV-1
YFLLKLAGRWPVKTI

SEQ ID NO: 3669 - protein, 9 aa, HIV-1
LKLAGRWPV

SEQ ID NO: 3670 - protein, 15 aa, HIV-1
YFLLKLAGRWPVKTI

SEQ ID NO: 3671 - protein, 9 aa, HIV-1
YFLLKLAGR

SEQ ID NO: 3672 - protein, 15 aa, HIV-1
YHSNWRAMASDFNLP

SEQ ID NO: 3673 - protein, 9 aa, HIV-1
WRAMASDFN

SEQ ID NO: 3674 - protein, 15 aa, HIV-1
YIEAEVIPAETGQET

SEQ ID NO: 3675 - protein, 9 aa, HIV-1
AEVIPAETG

SEQ ID NO: 3676 - protein, 15 aa, HIV-1
YKLKHIVWASRELER

SEQ ID NO: 3677 - protein, 9 aa, HIV-1
LKHIVWASR

SEQ ID NO: 3678 - protein, 15 aa, HIV-1
YKRWIILGLNKIVRM

SEQ ID NO: 3679 - protein, 9 aa, HIV-1
ILGLNKIVR

SEQ ID NO: 3680 - protein, 15 aa, HIV-1
YKRWIILGLNKIVRM

SEQ ID NO: 3681 - protein, 9 aa, HIV-1
WIILGLNKI

SEQ ID NO: 3682 - protein, 15 aa, HIV-1
YKTLRAEQASQEVKN

SEQ ID NO: 3683 - protein, 9 aa, HIV-1
YKTLRAEQA

SEQ ID NO: 3684 - protein, 15 aa, HIV-1
YLALQDSGLEVNIVT

SEQ ID NO: 3685 - protein, 9 aa, HIV-1
LQDSGLEVN

SEQ ID NO: 3686 - protein, 15 aa, HIV-1
YLAWVPAHKGIGGNE

SEQ ID NO: 3687 - protein, 9 aa, HIV-1
LAWVPAHKG

SEQ ID NO: 3688 - protein, 15 aa, HIV-1
YLAWVPAHKGIGGNE

SEQ ID NO: 3689 - protein, 9 aa, HIV-1
YLAWVPAHK

SEQ ID NO: 3690 - protein, 15 aa, HIV-1
YMDDLYVGSDLEIGQ

SEQ ID NO: 3691 - protein, 9 aa, HIV-1
YVGSDLEIG

SEQ ID NO: 3692 - protein, 15 aa, HIV-1
YNTVATLYCVHQRIE

SEQ ID NO: 3693 - protein, 9 aa, HIV-1
YNTVATLYC

SEQ ID NO: 3694 - protein, 15 aa, HIV-1
YPGIKVRQLCKLLRG

SEQ ID NO: 3695 - protein, 9 aa, HIV-1
VRQLCKLLR

SEQ ID NO: 3696 - protein, 15 aa, HIV-1
YPGIKVRQLCKLLRG

SEQ ID NO: 3697 - protein, 9 aa, HIV-1
YPGIKVRQL

SEQ ID NO: 3698 - protein, 15 aa, HIV-1
YPIVQNIQGQMVHQA

SEQ ID NO: 3699 - protein, 9 aa, HIV-1
VQNIQGQMV

SEQ ID NO: 3700 - protein, 15 aa, HIV-1
YQEPFKNLKTGKYAR

SEQ ID NO: 3701 - protein, 9 aa, HIV-1
FKNLKTGKY

SEQ ID NO: 3702 - protein, 15 aa, HIV-1
YSAGERIVDIIATDI

SEQ ID NO: 3703 - protein, 9 aa, HIV-1
ERIVDIIAT

SEQ ID NO: 3704 - protein, 15 aa, HIV-1
YVDGAANRETKLGKA

SEQ ID NO: 3705 - protein, 9 aa, HIV-1
YVDGAANRE

SEQ ID NO: 3706 - protein, 15 aa, HIV-1
YVDRFYKTLRAEQAS

SEQ ID NO: 3707 - protein, 9 aa, HIV-1
DRFYKTLRA

SEQ ID NO: 3708 - protein, 15 aa, HIV-1
YVDRFYKTLRAEQAS

SEQ ID NO: 3709 - protein, 9 aa, HIV-1
FYKTLRAEQ

SEQ ID NO: 3710 - protein, 15 aa, HIV-1
YVDRFYKTLRAEQAS

SEQ ID NO: 3711 - protein, 9 aa, HIV-1
YKTLRAEQA

SEQ ID NO: 3712 - protein, 15 aa, HIV-1
YWQATWIPEWEFVNT

SEQ ID NO: 3713 - protein, 9 aa, HIV-1
ATWIPEWEF

SEQ ID NO: 3714 - protein, 15 aa, HIV-1
AATLEEMMTACQGVG

SEQ ID NO: 3715 - protein, 9 aa, HIV-1
LEEMMTACQ

SEQ ID NO: 3716 - protein, 8 aa, HIV-1
MGARASVL

SEQ ID NO: 3717 - protein, 8 aa, HIV-1
SVLSGGEL

SEQ ID NO: 3718 - protein, 8 aa, HIV-1
ELDRWEKI

SEQ ID NO: 3719 - protein, 8 aa, HIV-1
RWEKIRLR

SEQ ID NO: 3720 - protein, 8 aa, HIV-1
RLRPGGKK

SEQ ID NO: 3721 - protein, 8 aa, HIV-1
KLKHIVWA

SEQ ID NO: 3722 - protein, 8 aa, HIV-1
IVWASREL

SEQ ID NO: 3723 - protein, 8 aa, HIV-1
WASRELER

SEQ ID NO: 3724 - protein, 8 aa, HIV-1
RELERFAV

SEQ ID NO: 3725 - protein, 8 aa, HIV-1
FAVNPGLL

SEQ ID NO: 3726 - protein, 8 aa, HIV-1
SEGCRQIL

SEQ ID NO: 3727 - protein, 8 aa, HIV-1
QLQPSLQT

SEQ ID NO: 3728 - protein, 8 aa, HIV-1
LQTGSEEL

SEQ ID NO: 3729 - protein, 8 aa, HIV-1
QTGSEELR

SEQ ID NO: 3730 - protein, 8 aa, HIV-1
SLYNTVAT

SEQ ID NO: 3731 - protein, 8 aa, HIV-1
LYNTVATL

SEQ ID NO: 3732 - protein, 8 aa, HIV-1
YNTVATLY

SEQ ID NO: 3733 - protein, 8 aa, HIV-1
TVATLYCV

SEQ ID NO: 3734 - protein, 8 aa, HIV-1
TLYCVHQR

SEQ ID NO: 3735 - protein, 8 aa, HIV-1
LYCVHQRI

SEQ ID NO: 3736 - protein, 8 aa, HIV-1
DTKEALDK

SEQ ID NO: 3737 - protein, 8 aa, HIV-1
KIEEEQNK

SEQ ID NO: 3738 - protein, 8 aa, HIV-1
DTGHSNQV

SEQ ID NO: 3739 - protein, 8 aa, HIV-1
QVSQNYPI

SEQ ID NO: 3740 - protein, 8 aa, HIV-1
NYPIVQNI

SEQ ID NO: 3741 - protein, 8 aa, HIV-1
YPIVQNIQ

SEQ ID NO: 3742 - protein, 8 aa, HIV-1
GQMVHQAI

SEQ ID NO: 3743 - protein, 8 aa, HIV-1
SPRTLNAW

SEQ ID NO: 3744 - protein, 8 aa, HIV-1
RTLNAWVK

SEQ ID NO: 3745 - protein, 8 aa, HIV-1
TLNAWVKV

SEQ ID NO: 3746 - protein, 8 aa, HIV-1
WVKVVEEK

SEQ ID NO: 3747 - protein, 8 aa, HIV-1
KVVEEKAF

SEQ ID NO: 3748 - protein, 8 aa, HIV-1
EKAFSPEV

SEQ ID NO: 3749 - protein, 8 aa, HIV-1
FSPEVIPM

SEQ ID NO: 3750 - protein, 8 aa, HIV-1
SPEVIPMF

SEQ ID NO: 3751 - protein, 8 aa, HIV-1
EVIPMFSA

SEQ ID NO: 3752 - protein, 8 aa, HIV-1
VIPMFSAL

SEQ ID NO: 3753 - protein, 8 aa, HIV-1
IPMFSALS

SEQ ID NO: 3754 - protein, 8 aa, HIV-1
FSALSEGA

SEQ ID NO: 3755 - protein, 8 aa, HIV-1
ALSEGATP

SEQ ID NO: 3756 - protein, 8 aa, HIV-1
TPQDLNTM

SEQ ID NO: 3757 - protein, 8 aa, HIV-1
NTVGGHQA

SEQ ID NO: 3758 - protein, 8 aa, HIV-1
TVGGHQAA

SEQ ID NO: 3759 - protein, 8 aa, HIV-1
HQAAMQML

SEQ ID NO: 3760 - protein, 8 aa, HIV-1
QAAMQMLK

SEQ ID NO: 3761 - protein, 8 aa, HIV-1
MQMLKETI

SEQ ID NO: 3762 - protein, 8 aa, HIV-1
ETINEEAA

SEQ ID NO: 3763 - protein, 8 aa, HIV-1
EEAAEWDR

SEQ ID NO: 3764 - protein, 8 aa, HIV-1
EAAEWDRV

SEQ ID NO: 3765 - protein, 8 aa, HIV-1
EWDRVHPV

SEQ ID NO: 3766 - protein, 8 aa, HIV-1
HPVHAGPI

SEQ ID NO: 3767 - protein, 8 aa, HIV-1
GPIAPGQM

SEQ ID NO: 3768 - protein, 8 aa, HIV-1
WMTNNPPI

SEQ ID NO: 3769 - protein, 8 aa, HIV-1
TNNPPIPV

SEQ ID NO: 3770 - protein, 8 aa, HIV-1
PPIPVGEI

SEQ ID NO: 3771 - protein, 8 aa, HIV-1
PIPVGEIY

SEQ ID NO: 3772 - protein, 8 aa, HIV-1
GEIYKRWI

SEQ ID NO: 3773 - protein, 8 aa, HIV-1
EIYKRWII

SEQ ID NO: 3774 - protein, 8 aa, HIV-1
IYKRWIIL

SEQ ID NO: 3775 - protein, 8 aa, HIV-1
KRWIILGL

SEQ ID NO: 3776 - protein, 8 aa, HIV-1
WIILGLNK

SEQ ID NO: 3777 - protein, 8 aa, HIV-1
IILGLNKI

SEQ ID NO: 3778 - protein, 8 aa, HIV-1
ILGLNKIV

SEQ ID NO: 3779 - protein, 8 aa, HIV-1
LGLNKIVR

SEQ ID NO: 3780 - protein, 8 aa, HIV-1
GLNKIVRM

SEQ ID NO: 3781 - protein, 8 aa, HIV-1
IVRMYSPT

SEQ ID NO: 3782 - protein, 8 aa, HIV-1
RMYSPTSI

SEQ ID NO: 3783 - protein, 8 aa, HIV-1
MYSPTSIL

SEQ ID NO: 3784 - protein, 8 aa, HIV-1
SPTSILDI

SEQ ID NO: 3785 - protein, 8 aa, HIV-1
RQGPKEPF

SEQ ID NO: 3786 - protein, 8 aa, HIV-1
DYVDRFYK

SEQ ID NO: 3787 - protein, 8 aa, HIV-1
YVDRFYKT

SEQ ID NO: 3788 - protein, 8 aa, HIV-1
DRFYKTLR

SEQ ID NO: 3789 - protein, 8 aa, HIV-1
AEQASQEV

SEQ ID NO: 3790 - protein, 8 aa, HIV-1
EQASQEVK

SEQ ID NO: 3791 - protein, 8 aa, HIV-1
ASQEVKNW

SEQ ID NO: 3792 - protein, 8 aa, HIV-1
EVKNWMTE

SEQ ID NO: 3793 - protein, 8 aa, HIV-1
NWMTETLL

SEQ ID NO: 3794 - protein, 8 aa, HIV-1
WMTETLLV

SEQ ID NO: 3795 - protein, 8 aa, HIV-1
ETLLVQNA

SEQ ID NO: 3796 - protein, 8 aa, HIV-1
NPDCKTIL

SEQ ID NO: 3797 - protein, 8 aa, HIV-1
ILKALGPA

SEQ ID NO: 3798 - protein, 8 aa, HIV-1
ALGPAATL

SEQ ID NO: 3799 - protein, 8 aa, HIV-1
TLEEMMTA

SEQ ID NO: 3800 - protein, 8 aa, HIV-1
EEMMTACQ

SEQ ID NO: 3801 - protein, 8 aa, HIV-1
MMTACQGV

SEQ ID NO: 3802 - protein, 8 aa, HIV-1
GVGGPGHK

SEQ ID NO: 3803 - protein, 8 aa, HIV-1
VLAEAMSQ

SEQ ID NO: 3804 - protein, 8 aa, HIV-1
AEAMSQVT

SEQ ID NO: 3805 - protein, 8 aa, HIV-1
SQVTNSAT

SEQ ID NO: 3806 - protein, 8 aa, HIV-1
VTNSATIM

SEQ ID NO: 3807 - protein, 8 aa, HIV-1
SATIMMQR

SEQ ID NO: 3808 - protein, 8 aa, HIV-1
IMMQRGNF

SEQ ID NO: 3809 - protein, 8 aa, HIV-1
MMQRGNFR

SEQ ID NO: 3810 - protein, 8 aa, HIV-1
RGNFRNQR

SEQ ID NO: 3811 - protein, 8 aa, HIV-1
RNQRKIVK

SEQ ID NO: 3812 - protein, 8 aa, HIV-1
HTARNCRA

SEQ ID NO: 3813 - protein, 8 aa, HIV-1
RNCRAPRK

SEQ ID NO: 3814 - protein, 8 aa, HIV-1
NCRAPRKK

SEQ ID NO: 3815 - protein, 8 aa, HIV-1
APRKKGCW

SEQ ID NO: 3816 - protein, 8 aa, HIV-1
QMKDCTER

SEQ ID NO: 3817 - protein, 8 aa, HIV-1
CTERQANF

SEQ ID NO: 3818 - protein, 8 aa, HIV-1
TERQANFL

SEQ ID NO: 3819 - protein, 8 aa, HIV-1
RQANFLGK

SEQ ID NO: 3820 - protein, 8 aa, HIV-1
FLGKIWPS

SEQ ID NO: 3821 - protein, 8 aa, HIV-1
KGRPGNFL

SEQ ID NO: 3822 - protein, 8 aa, HIV-1
TAPPEESF

SEQ ID NO: 3823 - protein, 8 aa, HIV-1
EESFRSGV

SEQ ID NO: 3824 - protein, 8 aa, HIV-1
ETTTPPQK

SEQ ID NO: 3825 - protein, 8 aa, HIV-1
QEPIDKEL

SEQ ID NO: 3826 - protein, 8 aa, HIV-1
EPIDKELY

SEQ ID NO: 3827 - protein, 8 aa, HIV-1
ELYPLTSL

SEQ ID NO: 3828 - protein, 8 aa, HIV-1
LYPLTSLR

SEQ ID NO: 3829 - protein, 8 aa, HIV-1
PLTSLRSL

SEQ ID NO: 3830 - protein, 8 aa, HIV-1
SLFGNDPS

SEQ ID NO: 3831 - protein, 9 aa, HIV-1
VLSGGELDR

SEQ ID NO: 3832 - protein, 9 aa, HIV-1
LSGGELDRW

SEQ ID NO: 3833 - protein, 9 aa, HIV-1
DRWEKIRLR

SEQ ID NO: 3834 - protein, 9 aa, HIV-1
KIRLRPGGK

SEQ ID NO: 3835 - protein, 9 aa, HIV-1
RLRPGGKKK

SEQ ID NO: 3836 - protein, 9 aa, HIV-1
GGKKKYKLK

SEQ ID NO: 3837 - protein, 9 aa, HIV-1
KKYKLKHIV

SEQ ID NO: 3838 - protein, 9 aa, HIV-1
KYKLKHIVW

SEQ ID NO: 3839 - protein, 9 aa, HIV-1
KLKHIVWAS

SEQ ID NO: 3840 - protein, 9 aa, HIV-1
HIVWASREL

SEQ ID NO: 3841 - protein, 9 aa, HIV-1
WASRELERF

SEQ ID NO: 3842 - protein, 9 aa, HIV-1
ERFAVNPGL

SEQ ID NO: 3843 - protein, 9 aa, HIV-1
RFAVNPGLL

SEQ ID NO: 3844 - protein, 9 aa, HIV-1
AVNPGLLET

SEQ ID NO: 3845 - protein, 9 aa, HIV-1
GLLETSEGC

SEQ ID NO: 3846 - protein, 9 aa, HIV-1
ETSEGCRQI

SEQ ID NO: 3847 - protein, 9 aa, HIV-1
ILGQLQPSL

SEQ ID NO: 3848 - protein, 9 aa, HIV-1
GQLQPSLQT

SEQ ID NO: 3849 - protein, 9 aa, HIV-1
SLQTGSEEL

SEQ ID NO: 3850 - protein, 9 aa, HIV-1
LQTGSEELR

SEQ ID NO: 3851 - protein, 9 aa, HIV-1
GSEELRSLY

SEQ ID NO: 3852 - protein, 9 aa, HIV-1
ELRSLYNTV

SEQ ID NO: 3853 - protein, 9 aa, HIV-1
SLYNTVATL

SEQ ID NO: 3854 - protein, 9 aa, HIV-1
LYNTVATLY

SEQ ID NO: 3855 - protein, 9 aa, HIV-1
NTVATLYCV

SEQ ID NO: 3856 - protein, 9 aa, HIV-1
ATLYCVHQR

SEQ ID NO: 3857 - protein, 9 aa, HIV-1
TLYCVHQRI

SEQ ID NO: 3858 - protein, 9 aa, HIV-1
YCVHQRIEI

SEQ ID NO: 3859 - protein, 9 aa, HIV-1
CVHQRIEIK

SEQ ID NO: 3860 - protein, 9 aa, HIV-1
QRIEIKDTK

SEQ ID NO: 3861 - protein, 9 aa, HIV-1
EIKDTKEAL

SEQ ID NO: 3862 - protein, 9 aa, HIV-1
ALDKIEEEQ

SEQ ID NO: 3863 - protein, 9 aa, HIV-1
QQAAADTGH

SEQ ID NO: 3864 - protein, 9 aa, HIV-1
HSNQVSQNY

SEQ ID NO: 3865 - protein, 9 aa, HIV-1
NQVSQNYPI

SEQ ID NO: 3866 - protein, 9 aa, HIV-1
QVSQNYPIV

SEQ ID NO: 3867 - protein, 9 aa, HIV-1
QNYPIVQNI

SEQ ID NO: 3868 - protein, 9 aa, HIV-1
VQNIQGQMV

SEQ ID NO: 3869 - protein, 9 aa, HIV-1
IQGQMVHQA

SEQ ID NO: 3870 - protein, 9 aa, HIV-1
MVHQAISPR

SEQ ID NO: 3871 - protein, 9 aa, HIV-1
HQAISPRTL

SEQ ID NO: 3872 - protein, 9 aa, HIV-1
AISPRTLNA

SEQ ID NO: 3873 - protein, 9 aa, HIV-1
ISPRTLNAW

SEQ ID NO: 3874 - protein, 9 aa, HIV-1
SPRTLNAWV

SEQ ID NO: 3875 - protein, 9 aa, HIV-1
RTLNAWVKV

SEQ ID NO: 3876 - protein, 9 aa, HIV-1
TLNAWVKVV

SEQ ID NO: 3877 - protein, 9 aa, HIV-1
AWVKVVEEK

SEQ ID NO: 3878 - protein, 9 aa, HIV-1
EEKAFSPEV

SEQ ID NO: 3879 - protein, 9 aa, HIV-1
EKAFSPEVI

SEQ ID NO: 3880 - protein, 9 aa, HIV-1
FSPEVIPMF

SEQ ID NO: 3881 - protein, 9 aa, HIV-1
EVIPMFSAL

SEQ ID NO: 3882 - protein, 9 aa, HIV-1
IPMFSALSE

SEQ ID NO: 3883 - protein, 9 aa, HIV-1
ALSEGATPQ

SEQ ID NO: 3884 - protein, 9 aa, HIV-1
SEGATPQDL

SEQ ID NO: 3885 - protein, 9 aa, HIV-1
ATPQDLNTM

SEQ ID NO: 3886 - protein, 9 aa, HIV-1
TPQDLNTML

SEQ ID NO: 3887 - protein, 9 aa, HIV-1
DLNTMLNTV

SEQ ID NO: 3888 - protein, 9 aa, HIV-1
NTVGGHQAA

SEQ ID NO: 3889 - protein, 9 aa, HIV-1
TVGGHQAAM

SEQ ID NO: 3890 - protein, 9 aa, HIV-1
HQAAMQMLK

SEQ ID NO: 3891 - protein, 9 aa, HIV-1
AMQMLKETI

SEQ ID NO: 3892 - protein, 9 aa, HIV-1
ETINEEAAE

SEQ ID NO: 3893 - protein, 9 aa, HIV-1
TINEEAAEW

SEQ ID NO: 3894 - protein, 9 aa, HIV-1
EEAAEWDRV

SEQ ID NO: 3895 - protein, 9 aa, HIV-1
EAAEWDRVH

SEQ ID NO: 3896 - protein, 9 aa, HIV-1
AEWDRVHPV

SEQ ID NO: 3897 - protein, 9 aa, HIV-1
RVHPVHAGP

SEQ ID NO: 3898 - protein, 9 aa, HIV-1
HPVHAGPIA

SEQ ID NO: 3899 - protein, 9 aa, HIV-1
DIAGTTSTL

SEQ ID NO: 3900 - protein, 9 aa, HIV-1
TTSTLQEQI

SEQ ID NO: 3901 - protein, 9 aa, HIV-1
STLQEQIGW

SEQ ID NO: 3902 - protein, 9 aa, HIV-1
TLQEQIGWM

SEQ ID NO: 3903 - protein, 9 aa, HIV-1
GWMTNNPPI

SEQ ID NO: 3904 - protein, 9 aa, HIV-1
MTNNPPIPV

SEQ ID NO: 3905 - protein, 9 aa, HIV-1
NPPIPVGEI

SEQ ID NO: 3906 - protein, 9 aa, HIV-1
PPIPVGEIY

SEQ ID NO: 3907 - protein, 9 aa, HIV-1
IPVGEIYKR

SEQ ID NO: 3908 - protein, 9 aa, HIV-1
GEIYKRWII

SEQ ID NO: 3909 - protein, 9 aa, HIV-1
EIYKRWIIL

SEQ ID NO: 3910 - protein, 9 aa, HIV-1
YKRWIILGL

SEQ ID NO: 3911 - protein, 9 aa, HIV-1
RWIILGLNK

SEQ ID NO: 3912 - protein, 9 aa, HIV-1
WIILGLNKI

SEQ ID NO: 3913 - protein, 9 aa, HIV-1
IILGLNKIV

SEQ ID NO: 3914 - protein, 9 aa, HIV-1
GLNKIVRMY

SEQ ID NO: 3915 - protein, 9 aa, HIV-1
KIVRMYSPT

SEQ ID NO: 3916 - protein, 9 aa, HIV-1
IVRMYSPTS

SEQ ID NO: 3917 - protein, 9 aa, HIV-1
RMYSPTSIL

SEQ ID NO: 3918 - protein, 9 aa, HIV-1
SPTSILDIR

SEQ ID NO: 3919 - protein, 9 aa, HIV-1
SILDIRQGP

SEQ ID NO: 3920 - protein, 9 aa, HIV-1
ILDIRQGPK

SEQ ID NO: 3921 - protein, 9 aa, HIV-1
RQGPKEPFR

SEQ ID NO: 3922 - protein, 9 aa, HIV-1
EPFRDYVDR

SEQ ID NO: 3923 - protein, 9 aa, HIV-1
PFRDYVDRF

SEQ ID NO: 3924 - protein, 9 aa, HIV-1
RDYVDRFYK

SEQ ID NO: 3925 - protein, 9 aa, HIV-1
DYVDRFYKT

SEQ ID NO: 3926 - protein, 9 aa, HIV-1
YVDRFYKTL

SEQ ID NO: 3927 - protein, 9 aa, HIV-1
VDRFYKTLR

SEQ ID NO: 3928 - protein, 9 aa, HIV-1
RAEQASQEV

SEQ ID NO: 3929 - protein, 9 aa, HIV-1
QASQEVKNW

SEQ ID NO: 3930 - protein, 9 aa, HIV-1
EVKNWMTET

SEQ ID NO: 3931 - protein, 9 aa, HIV-1
NWMTETLLV

SEQ ID NO: 3932 - protein, 9 aa, HIV-1
WMTETLLVQ

SEQ ID NO: 3933 - protein, 9 aa, HIV-1
VQNANPDCK

SEQ ID NO: 3934 - protein, 9 aa, HIV-1
TILKALGPA

SEQ ID NO: 3935 - protein, 9 aa, HIV-1
ILKALGPAA

SEQ ID NO: 3936 - protein, 9 aa, HIV-1
KALGPAATL

SEQ ID NO: 3937 - protein, 9 aa, HIV-1
GPAATLEEM

SEQ ID NO: 3938 - protein, 9 aa, HIV-1
ATLEEMMTA

SEQ ID NO: 3939 - protein, 9 aa, HIV-1
TLEEMMTAC

SEQ ID NO: 3940 - protein, 9 aa, HIV-1
EEMMTACQG

SEQ ID NO: 3941 - protein, 9 aa, HIV-1
EMMTACQGV

SEQ ID NO: 3942 - protein, 9 aa, HIV-1
GVGGPGHKA

SEQ ID NO: 3943 - protein, 9 aa, HIV-1
GGPGHKARV

SEQ ID NO: 3944 - protein, 9 aa, HIV-1
GPGHKARVL

SEQ ID NO: 3945 - protein, 9 aa, HIV-1
KARVLAEAM

SEQ ID NO: 3946 - protein, 9 aa, HIV-1
VLAEAMSQV

SEQ ID NO: 3947 - protein, 9 aa, HIV-1
LAEAMSQVT

SEQ ID NO: 3948 - protein, 9 aa, HIV-1
AEAMSQVTN

SEQ ID NO: 3949 - protein, 9 aa, HIV-1
AMSQVTNSA

SEQ ID NO: 3950 - protein, 9 aa, HIV-1
SQVTNSATI

SEQ ID NO: 3951 - protein, 9 aa, HIV-1
QVTNSATIM

SEQ ID NO: 3952 - protein, 9 aa, HIV-1
VTNSATIMM

SEQ ID NO: 3953 - protein, 9 aa, HIV-1
NSATIMMQR

SEQ ID NO: 3954 - protein, 9 aa, HIV-1
IMMQRGNFR

SEQ ID NO: 3955 - protein, 9 aa, HIV-1
MMQRGNFRN

SEQ ID NO: 3956 - protein, 9 aa, HIV-1
RGNFRNQRK

SEQ ID NO: 3957 - protein, 9 aa, HIV-1
FRNQRKIVK

SEQ ID NO: 3958 - protein, 9 aa, HIV-1
NQRKIVKCF

SEQ ID NO: 3959 - protein, 9 aa, HIV-1
IVKCFNCGK

SEQ ID NO: 3960 - protein, 9 aa, HIV-1
EGHTARNCR

SEQ ID NO: 3961 - protein, 9 aa, HIV-1
TARNCRAPR

SEQ ID NO: 3962 - protein, 9 aa, HIV-1
ARNCRAPRK

SEQ ID NO: 3963 - protein, 9 aa, HIV-1
RNCRAPRKK

SEQ ID NO: 3964 - protein, 9 aa, HIV-1
APRKKGCWK

SEQ ID NO: 3965 - protein, 9 aa, HIV-1
HQMKDCTER

SEQ ID NO: 3966 - protein, 9 aa, HIV-1
RQANFLGKI

SEQ ID NO: 3967 - protein, 9 aa, HIV-1
QANFLGKIW

SEQ ID NO: 3968 - protein, 9 aa, HIV-1
FLGKIWPSY

SEQ ID NO: 3969 - protein, 9 aa, HIV-1
KIWPSYKGR

SEQ ID NO: 3970 - protein, 9 aa, HIV-1
WPSYKGRPG

SEQ ID NO: 3971 - protein, 9 aa, HIV-1
SYKGRPGNF

SEQ ID NO: 3972 - protein, 9 aa, HIV-1
KGRPGNFLQ

SEQ ID NO: 3973 - protein, 9 aa, HIV-1
FLQSRPEPT

SEQ ID NO: 3974 - protein, 9 aa, HIV-1
PTAPPEESF

SEQ ID NO: 3975 - protein, 9 aa, HIV-1
TAPPEESFR

SEQ ID NO: 3976 - protein, 9 aa, HIV-1
TPPQKQEPI

SEQ ID NO: 3977 - protein, 9 aa, HIV-1
PIDKELYPL

SEQ ID NO: 3978 - protein, 9 aa, HIV-1
KELYPLTSL

SEQ ID NO: 3979 - protein, 9 aa, HIV-1
ELYPLTSLR

SEQ ID NO: 3980 - protein, 9 aa, HIV-1
YPLTSLRSL

SEQ ID NO: 3981 - protein, 9 aa, HIV-1
SLFGNDPSS

SEQ ID NO: 3982 - protein, 10 aa, HIV-1
RASVLSGGEL

SEQ ID NO: 3983 - protein, 10 aa, HIV-1
SVLSGGELDR

SEQ ID NO: 3984 - protein, 10 aa, HIV-1
VLSGGELDRW

SEQ ID NO: 3985 - protein, 10 aa, HIV-1
ELDRWEKIRL

SEQ ID NO: 3986 - protein, 10 aa, HIV-1
KIRLRPGGKK

SEQ ID NO: 3987 - protein, 10 aa, HIV-1
RLRPGGKKKY

SEQ ID NO: 3988 - protein, 10 aa, HIV-1
RPGGKKKYKL

SEQ ID NO: 3989 - protein, 10 aa, HIV-1
KKYKLKHIVW

SEQ ID NO: 3990 - protein, 10 aa, HIV-1
KLKHIVWASR

SEQ ID NO: 3991 - protein, 10 aa, HIV-1
IVWASRELER

SEQ ID NO: 3992 - protein, 10 aa, HIV-1
VWASRELERF

SEQ ID NO: 3993 - protein, 10 aa, HIV-1
LERFAVNPGL

SEQ ID NO: 3994 - protein, 10 aa, HIV-1
ERFAVNPGLL

SEQ ID NO: 3995 - protein, 10 aa, HIV-1
FAVNPGLLET

SEQ ID NO: 3996 - protein, 10 aa, HIV-1
ETSEGCRQIL

SEQ ID NO: 3997 - protein, 10 aa, HIV-1
RQILGQLQPS

SEQ ID NO: 3998 - protein, 10 aa, HIV-1
QILGQLQPSL

SEQ ID NO: 3999 - protein, 10 aa, HIV-1
ILGQLQPSLQ

SEQ ID NO: 4000 - protein, 10 aa, HIV-1
SLQTGSEELR

SEQ ID NO: 4001 - protein, 10 aa, HIV-1
EELRSLYNTV

SEQ ID NO: 4002 - protein, 10 aa, HIV-1
RSLYNTVATL

SEQ ID NO: 4003 - protein, 10 aa, HIV-1
SLYNTVATLY

SEQ ID NO: 4004 - protein, 10 aa, HIV-1
VATLYCVHQR

SEQ ID NO: 4005 - protein, 10 aa, HIV-1
ATLYCVHQRI

SEQ ID NO: 4006 - protein, 10 aa, HIV-1
LYCVHQRIEI

SEQ ID NO: 4007 - protein, 10 aa, HIV-1
IEIKDTKEAL

SEQ ID NO: 4008 - protein, 10 aa, HIV-1
AADTGHSNQV

SEQ ID NO: 4009 - protein, 10 aa, HIV-1
NQVSQNYPIV

SEQ ID NO: 4010 - protein, 10 aa, HIV-1
SQNYPIVQNI

SEQ ID NO: 4011 - protein, 10 aa, HIV-1
PIVQNIQGQM

SEQ ID NO: 4012 - protein, 10 aa, HIV-1
IVQNIQGQMV

SEQ ID NO: 4013 - protein, 10 aa, HIV-1
VQNIQGQMVH

SEQ ID NO: 4014 - protein, 10 aa, HIV-1
NIQGQMVHQA

SEQ ID NO: 4015 - protein, 10 aa, HIV-1
IQGQMVHQAI

SEQ ID NO: 4016 - protein, 10 aa, HIV-1
QMVHQAISPR

SEQ ID NO: 4017 - protein, 10 aa, HIV-1
AISPRTLNAW

SEQ ID NO: 4018 - protein, 10 aa, HIV-1
RTLNAWVKVV

SEQ ID NO: 4019 - protein, 10 aa, HIV-1
NAWVKVVEEK

SEQ ID NO: 4020 - protein, 10 aa, HIV-1
WVKVVEEKAF

SEQ ID NO: 4021 - protein, 10 aa, HIV-1
VEEKAFSPEV

SEQ ID NO: 4022 - protein, 10 aa, HIV-1
EEKAFSPEVI

SEQ ID NO: 4023 - protein, 10 aa, HIV-1
KAFSPEVIPM

SEQ ID NO: 4024 - protein, 10 aa, HIV-1
AFSPEVIPMF

SEQ ID NO: 4025 - protein, 10 aa, HIV-1
PEVIPMFSAL

SEQ ID NO: 4026 - protein, 10 aa, HIV-1
EVIPMFSALS

SEQ ID NO: 4027 - protein, 10 aa, HIV-1
PMFSALSEGA

SEQ ID NO: 4028 - protein, 10 aa, HIV-1
ATPQDLNTML

SEQ ID NO: 4029 - protein, 10 aa, HIV-1
MLNTVGGHQA

SEQ ID NO: 4030 - protein, 10 aa, HIV-1
NTVGGHQAAM

SEQ ID NO: 4031 - protein, 10 aa, HIV-1
GHQAAMQMLK

SEQ ID NO: 4032 - protein, 10 aa, HIV-1
AAMQMLKETI

SEQ ID NO: 4033 - protein, 10 aa, HIV-1
MLKETINEEA

SEQ ID NO: 4034 - protein, 10 aa, HIV-1
ETINEEAAEW

SEQ ID NO: 4035 - protein, 10 aa, HIV-1
AAEWDRVHPV

SEQ ID NO: 4036 - protein, 10 aa, HIV-1
RVHPVHAGPI

SEQ ID NO: 4037 - protein, 10 aa, HIV-1
HPVHAGPIAP

SEQ ID NO: 4038 - protein, 10 aa, HIV-1
IAPGQMREPR

SEQ ID NO: 4039 - protein, 10 aa, HIV-1
TSTLQEQIGW

SEQ ID NO: 4040 - protein, 10 aa, HIV-1
STLQEQIGWM

SEQ ID NO: 4041 - protein, 10 aa, HIV-1
TLQEQIGWMT

SEQ ID NO: 4042 - protein, 10 aa, HIV-1
WMTNNPPIPV

SEQ ID NO: 4043 - protein, 10 aa, HIV-1
NPPIPVGEIY

SEQ ID NO: 4044 - protein, 10 aa, HIV-1
IPVGEIYKRW

SEQ ID NO: 4045 - protein, 10 aa, HIV-1
GEIYKRWIIL

SEQ ID NO: 4046 - protein, 10 aa, HIV-1
IYKRWIILGL

SEQ ID NO: 4047 - protein, 10 aa, HIV-1
KRWIILGLNK

SEQ ID NO: 4048 - protein, 10 aa, HIV-1
RWIILGLNKI

SEQ ID NO: 4049 - protein, 10 aa, HIV-1
WIILGLNKIV

SEQ ID NO: 4050 - protein, 10 aa, HIV-1
IILGLNKIVR

SEQ ID NO: 4051 - protein, 10 aa, HIV-1
ILGLNKIVRM

SEQ ID NO: 4052 - protein, 10 aa, HIV-1
IVRMYSPTSI

SEQ ID NO: 4053 - protein, 10 aa, HIV-1
MYSPTSILDI

SEQ ID NO: 4054 - protein, 10 aa, HIV-1
YSPTSILDIR

SEQ ID NO: 4055 - protein, 10 aa, HIV-1
SILDIRQGPK

SEQ ID NO: 4056 - protein, 10 aa, HIV-1
DIRQGPKEPF

SEQ ID NO: 4057 - protein, 10 aa, HIV-1
EPFRDYVDRF

SEQ ID NO: 4058 - protein, 10 aa, HIV-1
DYVDRFYKTL

SEQ ID NO: 4059 - protein, 10 aa, HIV-1
YVDRFYKTLR

SEQ ID NO: 4060 - protein, 10 aa, HIV-1
RFYKTLRAEQ

SEQ ID NO: 4061 - protein, 10 aa, HIV-1
RAEQASQEVK

SEQ ID NO: 4062 - protein, 10 aa, HIV-1
EVKNWMTETL

SEQ ID NO: 4063 - protein, 10 aa, HIV-1
WMTETLLVQN

SEQ ID NO: 4064 - protein, 10 aa, HIV-1
LVQNANPDCK

SEQ ID NO: 4065 - protein, 10 aa, HIV-1
KTILKALGPA

SEQ ID NO: 4066 - protein, 10 aa, HIV-1
TILKALGPAA

SEQ ID NO: 4067 - protein, 10 aa, HIV-1
ILKALGPAAT

SEQ ID NO: 4068 - protein, 10 aa, HIV-1
GPAATLEEMM

SEQ ID NO: 4069 - protein, 10 aa, HIV-1
ATLEEMMTAC

SEQ ID NO: 4070 - protein, 10 aa, HIV-1
TLEEMMTACQ

SEQ ID NO: 4071 - protein, 10 aa, HIV-1
EEMMTACQGV

SEQ ID NO: 4072 - protein, 10 aa, HIV-1
VGGPGHKARV

SEQ ID NO: 4073 - protein, 10 aa, HIV-1
RVLAEAMSQV

SEQ ID NO: 4074 - protein, 10 aa, HIV-1
VLAEAMSQVT

SEQ ID NO: 4075 - protein, 10 aa, HIV-1
AEAMSQVTNS

SEQ ID NO: 4076 - protein, 10 aa, HIV-1
EAMSQVTNSA

SEQ ID NO: 4077 - protein, 10 aa, HIV-1
AMSQVTNSAT

SEQ ID NO: 4078 - protein, 10 aa, HIV-1
SQVTNSATIM

SEQ ID NO: 4079 - protein, 10 aa, HIV-1
QVTNSATIMM

SEQ ID NO: 4080 - protein, 10 aa, HIV-1
TNSATIMMQR

SEQ ID NO: 4081 - protein, 10 aa, HIV-1
ATIMMQRGNF

SEQ ID NO: 4082 - protein, 10 aa, HIV-1
TIMMQRGNFR

SEQ ID NO: 4083 - protein, 10 aa, HIV-1
MMQRGNFRNQ

SEQ ID NO: 4084 - protein, 10 aa, HIV-1
MQRGNFRNQR

SEQ ID NO: 4085 - protein, 10 aa, HIV-1
NFRNQRKIVK

SEQ ID NO: 4086 - protein, 10 aa, HIV-1
KIVKCFNCGK

SEQ ID NO: 4087 - protein, 10 aa, HIV-1
KEGHTARNCR

SEQ ID NO: 4088 - protein, 10 aa, HIV-1
HTARNCRAPR

SEQ ID NO: 4089 - protein, 10 aa, HIV-1
TARNCRAPRK

SEQ ID NO: 4090 - protein, 10 aa, HIV-1
ARNCRAPRKK

SEQ ID NO: 4091 - protein, 10 aa, HIV-1
RAPRKKGCWK

SEQ ID NO: 4092 - protein, 10 aa, HIV-1
APRKKGCWKC

SEQ ID NO: 4093 - protein, 10 aa, HIV-1
RKKGCWKCGK

SEQ ID NO: 4094 - protein, 10 aa, HIV-1
KCGKEGHQMK

SEQ ID NO: 4095 - protein, 10 aa, HIV-1
QMKDCTERQA

SEQ ID NO: 4096 - protein, 10 aa, HIV-1
TERQANFLGK

SEQ ID NO: 4097 - protein, 10 aa, HIV-1
RQANFLGKIW

SEQ ID NO: 4098 - protein, 10 aa, HIV-1
FLGKIWPSYK

SEQ ID NO: 4099 - protein, 10 aa, HIV-1
SYKGRPGNFL

SEQ ID NO: 4100 - protein, 10 aa, HIV-1
FLQSRPEPTA

SEQ ID NO: 4101 - protein, 10 aa, HIV-1
EPTAPPEESF

SEQ ID NO: 4102 - protein, 10 aa, HIV-1
PTAPPEESFR

SEQ ID NO: 4103 - protein, 10 aa, HIV-1
EESFRSGVET

SEQ ID NO: 4104 - protein, 10 aa, HIV-1
GVETTTPPQK

SEQ ID NO: 4105 - protein, 10 aa, HIV-1
TTPPQKQEPI

SEQ ID NO: 4106 - protein, 10 aa, HIV-1
EPIDKELYPL

SEQ ID NO: 4107 - protein, 10 aa, HIV-1
ELYPLTSLRS

SEQ ID NO: 4108 - protein, 10 aa, HIV-1
LYPLTSLRSL

SEQ ID NO: 4109 - protein, 10 aa, HIV-1
YPLTSLRSLF

SEQ ID NO: 4110 - protein, 10 aa, HIV-1
SLFGNDPSSQ

SEQ ID NO: 4111 - protein, 11 aa, HIV-1
VLSGGELDRWE

SEQ ID NO: 4112 - protein, 11 aa, HIV-1
LSGGELDRWEK

SEQ ID NO: 4113 - protein, 11 aa, HIV-1
GELDRWEKIRL

SEQ ID NO: 4114 - protein, 11 aa, HIV-1
ELDRWEKIRLR

SEQ ID NO: 4115 - protein, 11 aa, HIV-1
KIRLRPGGKKK

SEQ ID NO: 4116 - protein, 11 aa, HIV-1
RLRPGGKKKYK

SEQ ID NO: 4117 - protein, 11 aa, HIV-1
HIVWASRELER

SEQ ID NO: 4118 - protein, 11 aa, HIV-1
WASRELERFAV

SEQ ID NO: 4119 - protein, 11 aa, HIV-1
ELERFAVNPGL

SEQ ID NO: 4120 - protein, 11 aa, HIV-1
LERFAVNPGLL

SEQ ID NO: 4121 - protein, 11 aa, HIV-1
GLLETSEGCRQ

SEQ ID NO: 4122 - protein, 11 aa, HIV-1
LLETSEGCRQI

SEQ ID NO: 4123 - protein, 11 aa, HIV-1
LETSEGCRQIL

SEQ ID NO: 4124 - protein, 11 aa, HIV-1
SEGCRQILGQL

SEQ ID NO: 4125 - protein, 11 aa, HIV-1
RQILGQLQPSL

SEQ ID NO: 4126 - protein, 11 aa, HIV-1
ILGQLQPSLQT

SEQ ID NO: 4127 - protein, 11 aa, HIV-1
QPSLQTGSEEL

SEQ ID NO: 4128 - protein, 11 aa, HIV-1
LQTGSEELRSL

SEQ ID NO: 4129 - protein, 11 aa, HIV-1
QTGSEELRSLY

SEQ ID NO: 4130 - protein, 11 aa, HIV-1
SEELRSLYNTV

SEQ ID NO: 4131 - protein, 11 aa, HIV-1
RSLYNTVATLY

SEQ ID NO: 4132 - protein, 11 aa, HIV-1
SLYNTVATLYC

SEQ ID NO: 4133 - protein, 11 aa, HIV-1
LYNTVATLYCV

SEQ ID NO: 4134 - protein, 11 aa, HIV-1
NTVATLYCVHQ

SEQ ID NO: 4135 - protein, 11 aa, HIV-1
TVATLYCVHQR

SEQ ID NO: 4136 - protein, 11 aa, HIV-1
TLYCVHQRIEI

SEQ ID NO: 4137 - protein, 11 aa, HIV-1
LYCVHQRIEIK

SEQ ID NO: 4138 - protein, 11 aa, HIV-1
EIKDTKEALDK

SEQ ID NO: 4139 - protein, 11 aa, HIV-1
ALDKIEEEQNK

SEQ ID NO: 4140 - protein, 11 aa, HIV-1
AAADTGHSNQV

SEQ ID NO: 4141 - protein, 11 aa, HIV-1
HSNQVSQNYPI

SEQ ID NO: 4142 - protein, 11 aa, HIV-1
YPIVQNIQGQM

SEQ ID NO: 4143 - protein, 11 aa, HIV-1
PIVQNIQGQMV

SEQ ID NO: 4144 - protein, 11 aa, HIV-1
NIQGQMVHQAI

SEQ ID NO: 4145 - protein, 11 aa, HIV-1
GQMVHQAISPR

SEQ ID NO: 4146 - protein, 11 aa, HIV-1
MVHQAISPRTL

SEQ ID NO: 4147 - protein, 11 aa, HIV-1
QAISPRTLNAW

SEQ ID NO: 4148 - protein, 11 aa, HIV-1
AISPRTLNAWV

SEQ ID NO: 4149 - protein, 11 aa, HIV-1
ISPRTLNAWVK

SEQ ID NO: 4150 - protein, 11 aa, HIV-1
SPRTLNAWVKV

SEQ ID NO: 4151 - protein, 11 aa, HIV-1
LNAWVKVVEEK

SEQ ID NO: 4152 - protein, 11 aa, HIV-1
AWVKVVEEKAF

SEQ ID NO: 4153 - protein, 11 aa, HIV-1
VVEEKAFSPEV

SEQ ID NO: 4154 - protein, 11 aa, HIV-1
KAFSPEVIPMF

SEQ ID NO: 4155 - protein, 11 aa, HIV-1
FSPEVIPMFSA

SEQ ID NO: 4156 - protein, 11 aa, HIV-1
SPEVIPMFSAL

SEQ ID NO: 4157 - protein, 11 aa, HIV-1
EVIPMFSALSE

SEQ ID NO: 4158 - protein, 11 aa, HIV-1
IPMFSALSEGA

SEQ ID NO: 4159 - protein, 11 aa, HIV-1
ALSEGATPQDL

SEQ ID NO: 4160 - protein, 11 aa, HIV-1
EGATPQDLNTM

SEQ ID NO: 4161 - protein, 11 aa, HIV-1
PQDLNTMLNTV

SEQ ID NO: 4162 - protein, 11 aa, HIV-1
TMLNTVGGHQA

SEQ ID NO: 4163 - protein, 11 aa, HIV-1
MLNTVGGHQAA

SEQ ID NO: 4164 - protein, 11 aa, HIV-1
TVGGHQAAMQM

SEQ ID NO: 4165 - protein, 11 aa, HIV-1
GGHQAAMQMLK

SEQ ID NO: 4166 - protein, 11 aa, HIV-1
QAAMQMLKETI

SEQ ID NO: 4167 - protein, 11 aa, HIV-1
MQMLKETINEE

SEQ ID NO: 4168 - protein, 11 aa, HIV-1
QMLKETINEEA

SEQ ID NO: 4169 - protein, 11 aa, HIV-1
MLKETINEEAA

SEQ ID NO: 4170 - protein, 11 aa, HIV-1
TINEEAAEWDR

SEQ ID NO: 4171 - protein, 11 aa, HIV-1
EAAEWDRVHPV

SEQ ID NO: 4172 - protein, 11 aa, HIV-1
RVHPVHAGPIA

SEQ ID NO: 4173 - protein, 11 aa, HIV-1
HPVHAGPIAPG

SEQ ID NO: 4174 - protein, 11 aa, HIV-1
HAGPIAPGQMR

SEQ ID NO: 4175 - protein, 11 aa, HIV-1
TTSTLQEQIGW

SEQ ID NO: 4176 - protein, 11 aa, HIV-1
QIGWMTNNPPI

SEQ ID NO: 4177 - protein, 11 aa, HIV-1
IPVGEIYKRWI

SEQ ID NO: 4178 - protein, 11 aa, HIV-1
EIYKRWIILGL

SEQ ID NO: 4179 - protein, 11 aa, HIV-1
KRWIILGLNKI

SEQ ID NO: 4180 - protein, 11 aa, HIV-1
WIILGLNKIVR

SEQ ID NO: 4181 - protein, 11 aa, HIV-1
IILGLNKIVRM

SEQ ID NO: 4182 - protein, 11 aa, HIV-1
KIVRMYSPTSI

SEQ ID NO: 4183 - protein, 11 aa, HIV-1
IVRMYSPTSIL

SEQ ID NO: 4184 - protein, 11 aa, HIV-1
RMYSPTSILDI

SEQ ID NO: 4185 - protein, 11 aa, HIV-1
MYSPTSILDIR

SEQ ID NO: 4186 - protein, 11 aa, HIV-1
TSILDIRQGPK

SEQ ID NO: 4187 - protein, 11 aa, HIV-1
DIRQGPKEPFR

SEQ ID NO: 4188 - protein, 11 aa, HIV-1
RQGPKEPFRDY

SEQ ID NO: 4189 - protein, 11 aa, HIV-1
QGPKEPFRDYV

SEQ ID NO: 4190 - protein, 11 aa, HIV-1
EPFRDYVDRFY

SEQ ID NO: 4191 - protein, 11 aa, HIV-1
PFRDYVDRFYK

SEQ ID NO: 4192 - protein, 11 aa, HIV-1
DYVDRFYKTLR

SEQ ID NO: 4193 - protein, 11 aa, HIV-1
YVDRFYKTLRA

SEQ ID NO: 4194 - protein, 11 aa, HIV-1
TLRAEQASQEV

SEQ ID NO: 4195 - protein, 11 aa, HIV-1
AEQASQEVKNW

SEQ ID NO: 4196 - protein, 11 aa, HIV-1
QEVKNWMTETL

SEQ ID NO: 4197 - protein, 11 aa, HIV-1
EVKNWMTETLL

SEQ ID NO: 4198 - protein, 11 aa, HIV-1
WMTETLLVQNA

SEQ ID NO: 4199 - protein, 11 aa, HIV-1
LLVQNANPDCK

SEQ ID NO: 4200 - protein, 11 aa, HIV-1
NANPDCKTILK

SEQ ID NO: 4201 - protein, 11 aa, HIV-1
NPDCKTILKAL

SEQ ID NO: 4202 - protein, 11 aa, HIV-1
KTILKALGPAA

SEQ ID NO: 4203 - protein, 11 aa, HIV-1
ILKALGPAATL

SEQ ID NO: 4204 - protein, 11 aa, HIV-1
ALGPAATLEEM

SEQ ID NO: 4205 - protein, 11 aa, HIV-1
EEMMTACQGVG

SEQ ID NO: 4206 - protein, 11 aa, HIV-1
MTACQGVGGPG

SEQ ID NO: 4207 - protein, 11 aa, HIV-1
ACQGVGGPGHK

SEQ ID NO: 4208 - protein, 11 aa, HIV-1
GVGGPGHKARV

SEQ ID NO: 4209 - protein, 11 aa, HIV-1
KARVLAEAMSQ

SEQ ID NO: 4210 - protein, 11 aa, HIV-1
AEAMSQVTNSA

SEQ ID NO: 4211 - protein, 11 aa, HIV-1
EAMSQVTNSAT

SEQ ID NO: 4212 - protein, 11 aa, HIV-1
AMSQVTNSATI

SEQ ID NO: 4213 - protein, 11 aa, HIV-1
MSQVTNSATIM

SEQ ID NO: 4214 - protein, 11 aa, HIV-1
SQVTNSATIMM

SEQ ID NO: 4215 - protein, 11 aa, HIV-1
VTNSATIMMQR

SEQ ID NO: 4216 - protein, 11 aa, HIV-1
ATIMMQRGNFR

SEQ ID NO: 4217 - protein, 11 aa, HIV-1
MMQRGNFRNQR

SEQ ID NO: 4218 - protein, 11 aa, HIV-1
MQRGNFRNQRK

SEQ ID NO: 4219 - protein, 11 aa, HIV-1
FRNQRKIVKCF

SEQ ID NO: 4220 - protein, 11 aa, HIV-1
HTARNCRAPRK

SEQ ID NO: 4221 - protein, 11 aa, HIV-1
TARNCRAPRKK

SEQ ID NO: 4222 - protein, 11 aa, HIV-1
EGHQMKDCTER

SEQ ID NO: 4223 - protein, 11 aa, HIV-1
CTERQANFLGK

SEQ ID NO: 4224 - protein, 11 aa, HIV-1
TERQANFLGKI

SEQ ID NO: 4225 - protein, 11 aa, HIV-1
NFLGKIWPSYK

SEQ ID NO: 4226 - protein, 11 aa, HIV-1
WPSYKGRPGNF

SEQ ID NO: 4227 - protein, 11 aa, HIV-1
KGRPGNFLQSR

SEQ ID NO: 4228 - protein, 11 aa, HIV-1
EPTAPPEESFR

SEQ ID NO: 4229 - protein, 11 aa, HIV-1
RSGVETTTPPQ

SEQ ID NO: 4230 - protein, 11 aa, HIV-1
SGVETTTPPQK

SEQ ID NO: 4231 - protein, 11 aa, HIV-1
TTTPPQKQEPI

SEQ ID NO: 4232 - protein, 11 aa, HIV-1
QEPIDKELYPL

SEQ ID NO: 4233 - protein, 11 aa, HIV-1
EPIDKELYPLT

SEQ ID NO: 4234 - protein, 11 aa, HIV-1
DKELYPLTSLR

SEQ ID NO: 4235 - protein, 11 aa, HIV-1
ELYPLTSLRSL

SEQ ID NO: 4236 - protein, 11 aa, HIV-1
LYPLTSLRSLF

SEQ ID NO: 4237 - protein, 15 aa, HIV-1
AEAMSQVTNSATIMM

SEQ ID NO: 4238 - protein, 9 aa, HIV-1
AMSQVTNSA

SEQ ID NO: 4239 - protein, 15 aa, HIV-1
AEAMSQVTNSATIMM

SEQ ID NO: 4240 - protein, 9 aa, HIV-1
MSQVTNSAT

SEQ ID NO: 4241 - protein, 15 aa, HIV-1
AEAMSQVTNSATIMM

SEQ ID NO: 4242 - protein, 9 aa, HIV-1
QVTNSATIM

SEQ ID NO: 4243 - protein, 15 aa, HIV-1
AFSPEVIPMFSALSE

SEQ ID NO: 4244 - protein, 9 aa, HIV-1
VIPMFSALS

SEQ ID NO: 4245 - protein, 15 aa, HIV-1
AGPIAPGQMREPRGS

SEQ ID NO: 4246 - protein, 9 aa, HIV-1
IAPGQMREP

SEQ ID NO: 4247 - protein, 15 aa, HIV-1
AISPRTLNAWVKVVE

SEQ ID NO: 4248 - protein, 9 aa, HIV-1
PRTLNAWVK

SEQ ID NO: 4249 - protein, 15 aa, HIV-1
AISPRTLNAWVKVVE

SEQ ID NO: 4250 - protein, 9 aa, HIV-1
TLNAWVKVV

SEQ ID NO: 4251 - protein, 15 aa, HIV-1
AMSQVTNSATIMMQR

SEQ ID NO: 4252 - protein, 9 aa, HIV-1
AMSQVTNSA

SEQ ID NO: 4253 - protein, 15 aa, HIV-1
AMSQVTNSATIMMQR

SEQ ID NO: 4254 - protein, 9 aa, HIV-1
VTNSATIMM

SEQ ID NO: 4255 - protein, 15 aa, HIV-1
ANFLGKIWPSYKGRP

SEQ ID NO: 4256 - protein, 9 aa, HIV-1
FLGKIWPSY

SEQ ID NO: 4257 - protein, 15 aa, HIV-1
ANFLGKIWPSYKGRP

SEQ ID NO: 4258 - protein, 9 aa, HIV-1
GKIWPSYKG

SEQ ID NO: 4259 - protein, 15 aa, HIV-1
ANFLGKIWPSYKGRP

SEQ ID NO: 4260 - protein, 9 aa, HIV-1
LGKIWPSYK

SEQ ID NO: 4261 - protein, 15 aa, HIV-1
APPEESFRSGVETTT

SEQ ID NO: 4262 - protein, 9 aa, HIV-1
SFRSGVETT

SEQ ID NO: 4263 - protein, 15 aa, HIV-1
ARVLAEAMSQVTNSA

SEQ ID NO: 4264 - protein, 9 aa, HIV-1
LAEAMSQVT

SEQ ID NO: 4265 - protein, 15 aa, HIV-1
ARVLAEAMSQVTNSA

SEQ ID NO: 4266 - protein, 9 aa, HIV-1
VLAEAMSQV

SEQ ID NO: 4267 - protein, 15 aa, HIV-1
ASQEVKNWMTETLLV

SEQ ID NO: 4268 - protein, 9 aa, HIV-1
VKNWMTETL

SEQ ID NO: 4269 - protein, 15 aa, HIV-1
ASRELERFAVNPGLL

SEQ ID NO: 4270 - protein, 9 aa, HIV-1
LERFAVNPG

SEQ ID NO: 4271 - protein, 15 aa, HIV-1
ATIMMQRGNFRNQRK

SEQ ID NO: 4272 - protein, 9 aa, HIV-1
IMMQRGNFR

SEQ ID NO: 4273 - protein, 15 aa, HIV-1
ATLEEMMTACQGVGG

SEQ ID NO: 4274 - protein, 9 aa, HIV-1
LEEMMTACQ

SEQ ID NO: 4275 - protein, 15 aa, HIV-1
ATPQDLNTMLNTVGG

SEQ ID NO: 4276 - protein, 9 aa, HIV-1
LNTMLNTVG

SEQ ID NO: 4277 - protein, 15 aa, HIV-1
CKTILKALGPAATLE

SEQ ID NO: 4278 - protein, 9 aa, HIV-1
ILKALGPAA

SEQ ID NO: 4279 - protein, 15 aa, HIV-1
CKTILKALGPAATLE

SEQ ID NO: 4280 - protein, 9 aa, HIV-1
LKALGPAAT

SEQ ID NO: 4281 - protein, 15 aa, HIV-1
CRQILGQLQPSLQTG

SEQ ID NO: 4282 - protein, 9 aa, HIV-1
GQLQPSLQT

SEQ ID NO: 4283 - protein, 15 aa, HIV-1
CRQILGQLQPSLQTG

SEQ ID NO: 4284 - protein, 9 aa, HIV-1
LGQLQPSLQ

SEQ ID NO: 4285 - protein, 15 aa, HIV-1
DCKTILKALGPAATL

SEQ ID NO: 4286 - protein, 9 aa, HIV-1
ILKALGPAA

SEQ ID NO: 4287 - protein, 15 aa, HIV-1
DCKTILKALGPAATL

SEQ ID NO: 4288 - protein, 9 aa, HIV-1
LKALGPAAT

SEQ ID NO: 4289 - protein, 15 aa, HIV-1
DIAGTTSTLQEQIGW

SEQ ID NO: 4290 - protein, 9 aa, HIV-1
IAGTTSTLQ

SEQ ID NO: 4291 - protein, 15 aa, HIV-1
DKELYPLTSLRSLFG

SEQ ID NO: 4292 - protein, 9 aa, HIV-1
ELYPLTSLR

SEQ ID NO: 4293 - protein, 15 aa, HIV-1
DKELYPLTSLRSLFG

SEQ ID NO: 4294 - protein, 9 aa, HIV-1
LYPLTSLRS

SEQ ID NO: 4295 - protein, 15 aa, HIV-1
DLNTMLNTVGGHQAA

SEQ ID NO: 4296 - protein, 9 aa, HIV-1
LNTMLNTVG

SEQ ID NO: 4297 - protein, 15 aa, HIV-1
DLNTMLNTVGGHQAA

SEQ ID NO: 4298 - protein, 9 aa, HIV-1
MLNTVGGHQ

SEQ ID NO: 4299 - protein, 15 aa, HIV-1
DRFYKTLRAEQASQE

SEQ ID NO: 4300 - protein, 9 aa, HIV-1
DRFYKTLRA

SEQ ID NO: 4301 - protein, 15 aa, HIV-1
DRFYKTLRAEQASQE

SEQ ID NO: 4302 - protein, 9 aa, HIV-1
FYKTLRAEQ

SEQ ID NO: 4303 - protein, 15 aa, HIV-1
DRFYKTLRAEQASQE

SEQ ID NO: 4304 - protein, 9 aa, HIV-1
YKTLRAEQA

SEQ ID NO: 4305 - protein, 15 aa, HIV-1
DRVHPVHAGPIAPGQ

SEQ ID NO: 4306 - protein, 9 aa, HIV-1
VHAGPIAPG

SEQ ID NO: 4307 - protein, 15 aa, HIV-1
DYVDRFYKTLRAEQA

SEQ ID NO: 4308 - protein, 9 aa, HIV-1
DRFYKTLRA

SEQ ID NO: 4309 - protein, 15 aa, HIV-1
DYVDRFYKTLRAEQA

SEQ ID NO: 4310 - protein, 9 aa, HIV-1
FYKTLRAEQ

SEQ ID NO: 4311 - protein, 15 aa, HIV-1
DYVDRFYKTLRAEQA

SEQ ID NO: 4312 - protein, 9 aa, HIV-1
VDRFYKTLR

SEQ ID NO: 4313 - protein, 15 aa, HIV-1
DYVDRFYKTLRAEQA

SEQ ID NO: 4314 - protein, 9 aa, HIV-1
YVDRFYKTL

SEQ ID NO: 4315 - protein, 15 aa, HIV-1
EAMSQVTNSATIMMQ

SEQ ID NO: 4316 - protein, 9 aa, HIV-1
AMSQVTNSA

SEQ ID NO: 4317 - protein, 15 aa, HIV-1
EAMSQVTNSATIMMQ

SEQ ID NO: 4318 - protein, 9 aa, HIV-1
VTNSATIMM

SEQ ID NO: 4319 - protein, 15 aa, HIV-1
EELRSLYNTVATLYC

SEQ ID NO: 4320 - protein, 9 aa, HIV-1
LRSLYNTVA

SEQ ID NO: 4321 - protein, 15 aa, HIV-1
EELRSLYNTVATLYC

SEQ ID NO: 4322 - protein, 9 aa, HIV-1
LYNTVATLY

SEQ ID NO: 4323 - protein, 15 aa, HIV-1
EESFRSGVETTTPPQ

SEQ ID NO: 4324 - protein, 9 aa, HIV-1
FRSGVETTT

SEQ ID NO: 4325 - protein, 15 aa, HIV-1
EGCRQILGQLQPSLQ

SEQ ID NO: 4326 - protein, 9 aa, HIV-1
CRQILGQLQ

SEQ ID NO: 4327 - protein, 15 aa, HIV-1
EGCRQILGQLQPSLQ

SEQ ID NO: 4328 - protein, 9 aa, HIV-1
ILGQLQPSL

SEQ ID NO: 4329 - protein, 15 aa, HIV-1
EGCRQILGQLQPSLQ

SEQ ID NO: 4330 - protein, 9 aa, HIV-1
RQILGQLQP

SEQ ID NO: 4331 - protein, 15 aa, HIV-1
EIYKRWIILGLNKIV

SEQ ID NO: 4332 - protein, 9 aa, HIV-1
WIILGLNKI

SEQ ID NO: 4333 - protein, 15 aa, HIV-1
EIYKRWIILGLNKIV

SEQ ID NO: 4334 - protein, 9 aa, HIV-1
YKRWIILGL

SEQ ID NO: 4335 - protein, 15 aa, HIV-1
ELERFAVNPGLLETS

SEQ ID NO: 4336 - protein, 9 aa, HIV-1
FAVNPGLLE

SEQ ID NO: 4337 - protein, 15 aa, HIV-1
ELRSLYNTVATLYCV

SEQ ID NO: 4338 - protein, 9 aa, HIV-1
LYNTVATLY

SEQ ID NO: 4339 - protein, 15 aa, HIV-1
ELRSLYNTVATLYCV

SEQ ID NO: 4340 - protein, 9 aa, HIV-1
YNTVATLYC

SEQ ID NO: 4341 - protein, 15 aa, HIV-1
ELYPLTSLRSLFGND

SEQ ID NO: 4342 - protein, 9 aa, HIV-1
LTSLRSLFG

SEQ ID NO: 4343 - protein, 15 aa, HIV-1
ELYPLTSLRSLFGND

SEQ ID NO: 4344 - protein, 9 aa, HIV-1
LYPLTSLRS

SEQ ID NO: 4345 - protein, 15 aa, HIV-1
EPIDKELYPLTSLRS

SEQ ID NO: 4346 - protein, 9 aa, HIV-1
IDKELYPLT

SEQ ID NO: 4347 - protein, 15 aa, HIV-1
EPRGSDIAGTTSTLQ

SEQ ID NO: 4348 - protein, 9 aa, HIV-1
EPRGSDIAG

SEQ ID NO: 4349 - protein, 15 aa, HIV-1
EPRGSDIAGTTSTLQ

SEQ ID NO: 4350 - protein, 9 aa, HIV-1
GSDIAGTTS

SEQ ID NO: 4351 - protein, 15 aa, HIV-1
EPRGSDIAGTTSTLQ

SEQ ID NO: 4352 - protein, 9 aa, HIV-1
RGSDIAGTT

SEQ ID NO: 4353 - protein, 15 aa, HIV-1
EQASQEVKNWMTETL

SEQ ID NO: 4354 - protein, 9 aa, HIV-1
EVKNWMTET

SEQ ID NO: 4355 - protein, 15 aa, HIV-1
EQASQEVKNWMTETL

SEQ ID NO: 4356 - protein, 9 aa, HIV-1
SQEVKNWMT

SEQ ID NO: 4357 - protein, 15 aa, HIV-1
EQIGWMTNNPPIPVG

SEQ ID NO: 4358 - protein, 9 aa, HIV-1
IGWMTNNPP

SEQ ID NO: 4359 - protein, 15 aa, HIV-1
EQIGWMTNNPPIPVG

SEQ ID NO: 4360 - protein, 9 aa, HIV-1
MTNNPPIPV

SEQ ID NO: 4361 - protein, 15 aa, HIV-1
ERFAVNPGLLETSEG

SEQ ID NO: 4362 - protein, 9 aa, HIV-1
FAVNPGLLE

SEQ ID NO: 4363 - protein, 15 aa, HIV-1
ERFAVNPGLLETSEG

SEQ ID NO: 4364 - protein, 9 aa, HIV-1
VNPGLLETS

SEQ ID NO: 4365 - protein, 15 aa, HIV-1
ERQANFLGKIWPSYK

SEQ ID NO: 4366 - protein, 9 aa, HIV-1
FLGKIWPSY

SEQ ID NO: 4367 - protein, 15 aa, HIV-1
ESFRSGVETTTPPQK

SEQ ID NO: 4368 - protein, 9 aa, HIV-1
FRSGVETTT

SEQ ID NO: 4369 - protein, 15 aa, HIV-1
ETLLVQNANPDCKTI

SEQ ID NO: 4370 - protein, 9 aa, HIV-1
VQNANPDCK

SEQ ID NO: 4371 - protein, 15 aa, HIV-1
EVIPMFSALSEGATP

SEQ ID NO: 4372 - protein, 9 aa, HIV-1
IPMFSALSE

SEQ ID NO: 4373 - protein, 15 aa, HIV-1
EVIPMFSALSEGATP

SEQ ID NO: 4374 - protein, 9 aa, HIV-1
MFSALSEGA

SEQ ID NO: 4375 - protein, 15 aa, HIV-1
EVIPMFSALSEGATP

SEQ ID NO: 4376 - protein, 9 aa, HIV-1
VIPMFSALS

SEQ ID NO: 4377 - protein, 15 aa, HIV-1
EVKNWMTETLLVQNA

SEQ ID NO: 4378 - protein, 9 aa, HIV-1
NWMTETLLV

SEQ ID NO: 4379 - protein, 15 aa, HIV-1
EVKNWMTETLLVQNA

SEQ ID NO: 4380 - protein, 9 aa, HIV-1
WMTETLLVQ

SEQ ID NO: 4381 - protein, 15 aa, HIV-1
FAVNPGLLETSEGCR

SEQ ID NO: 4382 - protein, 9 aa, HIV-1
VNPGLLETS

SEQ ID NO: 4383 - protein, 15 aa, HIV-1
FLGKIWPSYKGRPGN

SEQ ID NO: 4384 - protein, 9 aa, HIV-1
FLGKIWPSY

SEQ ID NO: 4385 - protein, 15 aa, HIV-1
FLGKIWPSYKGRPGN

SEQ ID NO: 4386 - protein, 9 aa, HIV-1
GKIWPSYKG

SEQ ID NO: 4387 - protein, 15 aa, HIV-1
FLGKIWPSYKGRPGN

SEQ ID NO: 4388 - protein, 9 aa, HIV-1
LGKIWPSYK

SEQ ID NO: 4389 - protein, 15 aa, HIV-1
FLQSRPEPTAPPEES

SEQ ID NO: 4390 - protein, 9 aa, HIV-1
FLQSRPEPT

SEQ ID NO: 4391 - protein, 15 aa, HIV-1
FRNQRKIVKCFNCGK

SEQ ID NO: 4392 - protein, 9 aa, HIV-1
FRNQRKIVK

SEQ ID NO: 4393 - protein, 15 aa, HIV-1
FRSGVETTTPPQKQE

SEQ ID NO: 4394 - protein, 9 aa, HIV-1
VETTTPPQK

SEQ ID NO: 4395 - protein, 15 aa, HIV-1
FSPEVIPMFSALSEG

SEQ ID NO: 4396 - protein, 9 aa, HIV-1
VIPMFSALS

SEQ ID NO: 4397 - protein, 15 aa, HIV-1
FYKTLRAEQASQEVK

SEQ ID NO: 4398 - protein, 9 aa, HIV-1
FYKTLRAEQ

SEQ ID NO: 4399 - protein, 15 aa, HIV-1
FYKTLRAEQASQEVK

SEQ ID NO: 4400 - protein, 9 aa, HIV-1
YKTLRAEQA

SEQ ID NO: 4401 - protein, 15 aa, HIV-1
GATPQDLNTMLNTVG

SEQ ID NO: 4402 - protein, 9 aa, HIV-1
DLNTMLNTV

SEQ ID NO: 4403 - protein, 15 aa, HIV-1
GATPQDLNTMLNTVG

SEQ ID NO: 4404 - protein, 9 aa, HIV-1
PQDLNTMLN

SEQ ID NO: 4405 - protein, 15 aa, HIV-1
GCRQILGQLQPSLQT

SEQ ID NO: 4406 - protein, 9 aa, HIV-1
LGQLQPSLQ

SEQ ID NO: 4407 - protein, 15 aa, HIV-1
GEIYKRWIILGLNKI

SEQ ID NO: 4408 - protein, 9 aa, HIV-1
IYKRWIILG

SEQ ID NO: 4409 - protein, 15 aa, HIV-1
GEIYKRWIILGLNKI

SEQ ID NO: 4410 - protein, 9 aa, HIV-1
YKRWIILGL

SEQ ID NO: 4411 - protein, 15 aa, HIV-1
GGHQAAMQMLKETIN

SEQ ID NO: 4412 - protein, 9 aa, HIV-1
AAMQMLKET

SEQ ID NO: 4413 - protein, 15 aa, HIV-1
GHKARVLAEAMSQVT

SEQ ID NO: 4414 - protein, 9 aa, HIV-1
VLAEAMSQV

SEQ ID NO: 4415 - protein, 15 aa, HIV-1
GKIWPSYKGRPGNFL

SEQ ID NO: 4416 - protein, 9 aa, HIV-1
GKIWPSYKG

SEQ ID NO: 4417 - protein, 15 aa, HIV-1
GKKKYKLKHIVWASR

SEQ ID NO: 4418 - protein, 9 aa, HIV-1
YKLKHIVWA

SEQ ID NO: 4419 - protein, 15 aa, HIV-1
GLNKIVRMYSPTSIL

SEQ ID NO: 4420 - protein, 9 aa, HIV-1
IVRMYSPTS

SEQ ID NO: 4421 - protein, 15 aa, HIV-1
GLNKIVRMYSPTSIL

SEQ ID NO: 4422 - protein, 9 aa, HIV-1
LNKIVRMYS

SEQ ID NO: 4423 - protein, 15 aa, HIV-1
GLNKIVRMYSPTSIL

SEQ ID NO: 4424 - protein, 9 aa, HIV-1
VRMYSPTSI

SEQ ID NO: 4425 - protein, 15 aa, HIV-1
GNFLQSRPEPTAPPE

SEQ ID NO: 4426 - protein, 9 aa, HIV-1
FLQSRPEPT

SEQ ID NO: 4427 - protein, 15 aa, HIV-1
GNFRNQRKIVKCFNC

SEQ ID NO: 4428 - protein, 9 aa, HIV-1
FRNQRKIVK

SEQ ID NO: 4429 - protein, 15 aa, HIV-1
GPAATLEEMMTACQG

SEQ ID NO: 4430 - protein, 9 aa, HIV-1
LEEMMTACQ

SEQ ID NO: 4431 - protein, 15 aa, HIV-1
GQLQPSLQTGSEELR

SEQ ID NO: 4432 - protein, 9 aa, HIV-1
GQLQPSLQT

SEQ ID NO: 4433 - protein, 15 aa, HIV-1
GQMVHQAISPRTLNA

SEQ ID NO: 4434 - protein, 9 aa, HIV-1
MVHQAISPR

SEQ ID NO: 4435 - protein, 15 aa, HIV-1
GQMVHQAISPRTLNA

SEQ ID NO: 4436 - protein, 9 aa, HIV-1
VHQAISPRT

SEQ ID NO: 4437 - protein, 15 aa, HIV-1
GRPGNFLQSRPEPTA

SEQ ID NO: 4438 - protein, 9 aa, HIV-1
FLQSRPEPT

SEQ ID NO: 4439 - protein, 15 aa, HIV-1
GSDIAGTTSTLQEQI

SEQ ID NO: 4440 - protein, 9 aa, HIV-1
IAGTTSTLQ

SEQ ID NO: 4441 - protein, 15 aa, HIV-1
GSEELRSLYNTVATL

SEQ ID NO: 4442 - protein, 9 aa, HIV-1
LRSLYNTVA

SEQ ID NO: 4443 - protein, 15 aa, HIV-1
GTTSTLQEQIGWMTN

SEQ ID NO: 4444 - protein, 9 aa, HIV-1
LQEQIGWMT

SEQ ID NO: 4445 - protein, 15 aa, HIV-1
GWMTNNPPIPVGEIY

SEQ ID NO: 4446 - protein, 9 aa, HIV-1
MTNNPPIPV

SEQ ID NO: 4447 - protein, 15 aa, HIV-1
HKARVLAEAMSQVTN

SEQ ID NO: 4448 - protein, 9 aa, HIV-1
LAEAMSQVT

SEQ ID NO: 4449 - protein, 15 aa, HIV-1
HPVHAGPIAPGQMRE

SEQ ID NO: 4450 - protein, 9 aa, HIV-1
VHAGPIAPG

SEQ ID NO: 4451 - protein, 15 aa, HIV-1
IAGTTSTLQEQIGWM

SEQ ID NO: 4452 - protein, 9 aa, HIV-1
IAGTTSTLQ

SEQ ID NO: 4453 - protein, 15 aa, HIV-1
IDKELYPLTSLRSLF

SEQ ID NO: 4454 - protein, 9 aa, HIV-1
LYPLTSLRS

SEQ ID NO: 4455 - protein, 15 aa, HIV-1
IGWMTNNPPIPVGEI

SEQ ID NO: 4456 - protein, 9 aa, HIV-1
IGWMTNNPP

SEQ ID NO: 4457 - protein, 15 aa, HIV-1
IGWMTNNPPIPVGEI

SEQ ID NO: 4458 - protein, 9 aa, HIV-1
MTNNPPIPV

SEQ ID NO: 4459 - protein, 15 aa, HIV-1
IGWMTNNPPIPVGEI

SEQ ID NO: 4460 - protein, 9 aa, HIV-1
WMTNNPPIP

SEQ ID NO: 4461 - protein, 15 aa, HIV-1
IILGLNKIVRMYSPT

SEQ ID NO: 4462 - protein, 9 aa, HIV-1
ILGLNKIVR

SEQ ID NO: 4463 - protein, 15 aa, HIV-1
IILGLNKIVRMYSPT

SEQ ID NO: 4464 - protein, 9 aa, HIV-1
LGLNKIVRM

SEQ ID NO: 4465 - protein, 15 aa, HIV-1
IILGLNKIVRMYSPT

SEQ ID NO: 4466 - protein, 9 aa, HIV-1
LNKIVRMYS

SEQ ID NO: 4467 - protein, 15 aa, HIV-1
ILGLNKIVRMYSPTS

SEQ ID NO: 4468 - protein, 9 aa, HIV-1
ILGLNKIVR

SEQ ID NO: 4469 - protein, 15 aa, HIV-1
ILGLNKIVRMYSPTS

SEQ ID NO: 4470 - protein, 9 aa, HIV-1
LGLNKIVRM

SEQ ID NO: 4471 - protein, 15 aa, HIV-1
ILGLNKIVRMYSPTS

SEQ ID NO: 4472 - protein, 9 aa, HIV-1
LNKIVRMYS

SEQ ID NO: 4473 - protein, 15 aa, HIV-1
ILGQLQPSLQTGSEE

SEQ ID NO: 4474 - protein, 9 aa, HIV-1
GQLQPSLQT

SEQ ID NO: 4475 - protein, 15 aa, HIV-1
ILGQLQPSLQTGSEE

SEQ ID NO: 4476 - protein, 9 aa, HIV-1
LGQLQPSLQ

SEQ ID NO: 4477 - protein, 15 aa, HIV-1
ILKALGPAATLEEMM

SEQ ID NO: 4478 - protein, 9 aa, HIV-1
LKALGPAAT

SEQ ID NO: 4479 - protein, 15 aa, HIV-1
IMMQRGNFRNQRKIV

SEQ ID NO: 4480 - protein, 9 aa, HIV-1
IMMQRGNFR

SEQ ID NO: 4481 - protein, 15 aa, HIV-1
IPMFSALSEGATPQD

SEQ ID NO: 4482 - protein, 9 aa, HIV-1
MFSALSEGA

SEQ ID NO: 4483 - protein, 15 aa, HIV-1
IPVGEIYKRWIILGL

SEQ ID NO: 4484 - protein, 9 aa, HIV-1
IYKRWIILG

SEQ ID NO: 4485 - protein, 15 aa, HIV-1
IQGQMVHQAISPRTL

SEQ ID NO: 4486 - protein, 9 aa, HIV-1
MVHQAISPR

SEQ ID NO: 4487 - protein, 15 aa, HIV-1
IQGQMVHQAISPRTL

SEQ ID NO: 4488 - protein, 9 aa, HIV-1
VHQAISPRT

SEQ ID NO: 4489 - protein, 15 aa, HIV-1
ISPRTLNAWVKVVEE

SEQ ID NO: 4490 - protein, 9 aa, HIV-1
LNAWVKVVE

SEQ ID NO: 4491 - protein, 15 aa, HIV-1
ISPRTLNAWVKVVEE

SEQ ID NO: 4492 - protein, 9 aa, HIV-1
TLNAWVKVV

SEQ ID NO: 4493 - protein, 15 aa, HIV-1
IVQNIQGQMVHQAIS

SEQ ID NO: 4494 - protein, 9 aa, HIV-1
IQGQMVHQA

SEQ ID NO: 4495 - protein, 15 aa, HIV-1
IVRMYSPTSILDIRQ

SEQ ID NO: 4496 - protein, 9 aa, HIV-1
IVRMYSPTS

SEQ ID NO: 4497 - protein, 15 aa, HIV-1
IVRMYSPTSILDIRQ

SEQ ID NO: 4498 - protein, 9 aa, HIV-1
VRMYSPTSI

SEQ ID NO: 4499 - protein, 15 aa, HIV-1
IVRMYSPTSILDIRQ

SEQ ID NO: 4500 - protein, 9 aa, HIV-1
YSPTSILDI

SEQ ID NO: 4501 - protein, 15 aa, HIV-1
IWPSYKGRPGNFLQS

SEQ ID NO: 4502 - protein, 9 aa, HIV-1
YKGRPGNFL

SEQ ID NO: 4503 - protein, 15 aa, HIV-1
IYKRWIILGLNKIVR

SEQ ID NO: 4504 - protein, 9 aa, HIV-1
WIILGLNKI

SEQ ID NO: 4505 - protein, 15 aa, HIV-1
IYKRWIILGLNKIVR

SEQ ID NO: 4506 - protein, 9 aa, HIV-1
YKRWIILGL

SEQ ID NO: 4507 - protein, 15 aa, HIV-1
KAFSPEVIPMFSALS

SEQ ID NO: 4508 - protein, 9 aa, HIV-1
EVIPMFSAL

SEQ ID NO: 4509 - protein, 15 aa, HIV-1
KAFSPEVIPMFSALS

SEQ ID NO: 4510 - protein, 9 aa, HIV-1
FSPEVIPMF

SEQ ID NO: 4511 - protein, 15 aa, HIV-1
KAFSPEVIPMFSALS

SEQ ID NO: 4512 - protein, 9 aa, HIV-1
KAFSPEVIP

SEQ ID NO: 4513 - protein, 15 aa, HIV-1
KALGPAATLEEMMTA

SEQ ID NO: 4514 - protein, 9 aa, HIV-1
LGPAATLEE

SEQ ID NO: 4515 - protein, 15 aa, HIV-1
KARVLAEAMSQVTNS

SEQ ID NO: 4516 - protein, 9 aa, HIV-1
LAEAMSQVT

SEQ ID NO: 4517 - protein, 15 aa, HIV-1
KELYPLTSLRSLFGN

SEQ ID NO: 4518 - protein, 9 aa, HIV-1
ELYPLTSLR

SEQ ID NO: 4519 - protein, 15 aa, HIV-1
KELYPLTSLRSLFGN

SEQ ID NO: 4520 - protein, 9 aa, HIV-1
LYPLTSLRS

SEQ ID NO: 4521 - protein, 15 aa, HIV-1
KGRPGNFLQSRPEPT

SEQ ID NO: 4522 - protein, 9 aa, HIV-1
GRPGNFLQS

SEQ ID NO: 4523 - protein, 15 aa, HIV-1
KGRPGNFLQSRPEPT

SEQ ID NO: 4524 - protein, 9 aa, HIV-1
NFLQSRPEP

SEQ ID NO: 4525 - protein, 15 aa, HIV-1
KIVRMYSPTSILDIR

SEQ ID NO: 4526 - protein, 9 aa, HIV-1
IVRMYSPTS

SEQ ID NO: 4527 - protein, 15 aa, HIV-1
KIVRMYSPTSILDIR

SEQ ID NO: 4528 - protein, 9 aa, HIV-1
VRMYSPTSI

SEQ ID NO: 4529 - protein, 15 aa, HIV-1
KIVRMYSPTSILDIR

SEQ ID NO: 4530 - protein, 9 aa, HIV-1
YSPTSILDI

SEQ ID NO: 4531 - protein, 15 aa, HIV-1
KIWPSYKGRPGNFLQ

SEQ ID NO: 4532 - protein, 9 aa, HIV-1
YKGRPGNFL

SEQ ID NO: 4533 - protein, 15 aa, HIV-1
KKKYKLKHIVWASRE

SEQ ID NO: 4534 - protein, 9 aa, HIV-1
LKHIVWASR

SEQ ID NO: 4535 - protein, 15 aa, HIV-1
KKKYKLKHIVWASRE

SEQ ID NO: 4536 - protein, 9 aa, HIV-1
YKLKHIVWA

SEQ ID NO: 4537 - protein, 15 aa, HIV-1
KKYKLKHIVWASREL

SEQ ID NO: 4538 - protein, 9 aa, HIV-1
LKHIVWASR

SEQ ID NO: 4539 - protein, 15 aa, HIV-1
KKYKLKHIVWASREL

SEQ ID NO: 4540 - protein, 9 aa, HIV-1
YKLKHIVWA

SEQ ID NO: 4541 - protein, 15 aa, HIV-1
KLKHIVWASRELERF

SEQ ID NO: 4542 - protein, 9 aa, HIV-1
LKHIVWASR

SEQ ID NO: 4543 - protein, 15 aa, HIV-1
KNWMTETLLVQNANP

SEQ ID NO: 4544 - protein, 9 aa, HIV-1
WMTETLLVQ

SEQ ID NO: 4545 - protein, 15 aa, HIV-1
KRWIILGLNKIVRMY

SEQ ID NO: 4546 - protein, 9 aa, HIV-1
ILGLNKIVR

SEQ ID NO: 4547 - protein, 15 aa, HIV-1
KRWIILGLNKIVRMY

SEQ ID NO: 4548 - protein, 9 aa, HIV-1
LGLNKIVRM

SEQ ID NO: 4549 - protein, 15 aa, HIV-1
KRWIILGLNKIVRMY

SEQ ID NO: 4550 - protein, 9 aa, HIV-1
WIILGLNKI

SEQ ID NO: 4551 - protein, 15 aa, HIV-1
KTILKALGPAATLEE

SEQ ID NO: 4552 - protein, 9 aa, HIV-1
ILKALGPAA

SEQ ID NO: 4553 - protein, 15 aa, HIV-1
KTILKALGPAATLEE

SEQ ID NO: 4554 - protein, 9 aa, HIV-1
LKALGPAAT

SEQ ID NO: 4555 - protein, 15 aa, HIV-1
KYKLKHIVWASRELE

SEQ ID NO: 4556 - protein, 9 aa, HIV-1
LKHIVWASR

SEQ ID NO: 4557 - protein, 15 aa, HIV-1
LAEAMSQVTNSATIM

SEQ ID NO: 4558 - protein, 9 aa, HIV-1
AMSQVTNSA

SEQ ID NO: 4559 - protein, 15 aa, HIV-1
LAEAMSQVTNSATIM

SEQ ID NO: 4560 - protein, 9 aa, HIV-1
LAEAMSQVT

SEQ ID NO: 4561 - protein, 15 aa, HIV-1
LEEMMTACQGVGGPG

SEQ ID NO: 4562 - protein, 9 aa, HIV-1
MTACQGVGG

SEQ ID NO: 4563 - protein, 15 aa, HIV-1
LERFAVNPGLLETSE

SEQ ID NO: 4564 - protein, 9 aa, HIV-1
FAVNPGLLE

SEQ ID NO: 4565 - protein, 15 aa, HIV-1
LERFAVNPGLLETSE

SEQ ID NO: 4566 - protein, 9 aa, HIV-1
VNPGLLETS

SEQ ID NO: 4567 - protein, 15 aa, HIV-1
LGKIWPSYKGRPGNF

SEQ ID NO: 4568 - protein, 9 aa, HIV-1
LGKIWPSYK

SEQ ID NO: 4569 - protein, 15 aa, HIV-1
LGLNKIVRMYSPTSI

SEQ ID NO: 4570 - protein, 9 aa, HIV-1
IVRMYSPTS

SEQ ID NO: 4571 - protein, 15 aa, HIV-1
LGLNKIVRMYSPTSI

SEQ ID NO: 4572 - protein, 9 aa, HIV-1
LGLNKIVRM

SEQ ID NO: 4573 - protein, 15 aa, HIV-1
LGLNKIVRMYSPTSI

SEQ ID NO: 4574 - protein, 9 aa, HIV-1
LNKIVRMYS

SEQ ID NO: 4575 - protein, 15 aa, HIV-1
LGPAATLEEMMTACQ

SEQ ID NO: 4576 - protein, 9 aa, HIV-1
AATLEEMMT

SEQ ID NO: 4577 - protein, 15 aa, HIV-1
LGQLQPSLQTGSEEL

SEQ ID NO: 4578 - protein, 9 aa, HIV-1
LGQLQPSLQ

SEQ ID NO: 4579 - protein, 15 aa, HIV-1
LKALGPAATLEEMMT

SEQ ID NO: 4580 - protein, 9 aa, HIV-1
LKALGPAAT

SEQ ID NO: 4581 - protein, 15 aa, HIV-1
LKHIVWASRELERFA

SEQ ID NO: 4582 - protein, 9 aa, HIV-1
LKHIVWASR

SEQ ID NO: 4583 - protein, 15 aa, HIV-1
LLVQNANPDCKTILK

SEQ ID NO: 4584 - protein, 9 aa, HIV-1
VQNANPDCK

SEQ ID NO: 4585 - protein, 15 aa, HIV-1
LNKIVRMYSPTSILD

SEQ ID NO: 4586 - protein, 9 aa, HIV-1
IVRMYSPTS

SEQ ID NO: 4587 - protein, 15 aa, HIV-1
LNKIVRMYSPTSILD

SEQ ID NO: 4588 - protein, 9 aa, HIV-1
LNKIVRMYS

SEQ ID NO: 4589 - protein, 15 aa, HIV-1
LNKIVRMYSPTSILD

SEQ ID NO: 4590 - protein, 9 aa, HIV-1
VRMYSPTSI

SEQ ID NO: 4591 - protein, 15 aa, HIV-1
LNTMLNTVGGHQAAM

SEQ ID NO: 4592 - protein, 9 aa, HIV-1
LNTMLNTVG

SEQ ID NO: 4593 - protein, 15 aa, HIV-1
LNTMLNTVGGHQAAM

SEQ ID NO: 4594 - protein, 9 aa, HIV-1
MLNTVGGHQ

SEQ ID NO: 4595 - protein, 15 aa, HIV-1
LNTVGGHQAAMQMLK

SEQ ID NO: 4596 - protein, 9 aa, HIV-1
VGGHQAAMQ

SEQ ID NO: 4597 - protein, 15 aa, HIV-1
LQEQIGWMTNNPPIP

SEQ ID NO: 4598 - protein, 9 aa, HIV-1
IGWMTNNPP

SEQ ID NO: 4599 - protein, 15 aa, HIV-1
LRSLYNTVATLYCVH

SEQ ID NO: 4600 - protein, 9 aa, HIV-1
LYNTVATLY

SEQ ID NO: 4601 - protein, 15 aa, HIV-1
LRSLYNTVATLYCVH

SEQ ID NO: 4602 - protein, 9 aa, HIV-1
YNTVATLYC

SEQ ID NO: 4603 - protein, 15 aa, HIV-1
LTSLRSLFGNDPSSQ

SEQ ID NO: 4604 - protein, 9 aa, HIV-1
LTSLRSLFG

SEQ ID NO: 4605 - protein, 15 aa, HIV-1
LYNTVATLYCVHQRI

SEQ ID NO: 4606 - protein, 9 aa, HIV-1
LYNTVATLY

SEQ ID NO: 4607 - protein, 15 aa, HIV-1
LYNTVATLYCVHQRI

SEQ ID NO: 4608 - protein, 9 aa, HIV-1
YNTVATLYC

SEQ ID NO: 4609 - protein, 15 aa, HIV-1
LYPLTSLRSLFGNDP

SEQ ID NO: 4610 - protein, 9 aa, HIV-1
LTSLRSLFG

SEQ ID NO: 4611 - protein, 15 aa, HIV-1
LYPLTSLRSLFGNDP

SEQ ID NO: 4612 - protein, 9 aa, HIV-1
LYPLTSLRS

SEQ ID NO: 4613 - protein, 15 aa, HIV-1
MFSALSEGATPQDLN

SEQ ID NO: 4614 - protein, 9 aa, HIV-1
MFSALSEGA

SEQ ID NO: 4615 - protein, 15 aa, HIV-1
MGARASVLSGGELDR

SEQ ID NO: 4616 - protein, 9 aa, HIV-1
MGARASVLS

SEQ ID NO: 4617 - protein, 15 aa, HIV-1
MLNTVGGHQAAMQML

SEQ ID NO: 4618 - protein, 9 aa, HIV-1
MLNTVGGHQ

SEQ ID NO: 4619 - protein, 15 aa, HIV-1
MLNTVGGHQAAMQML

SEQ ID NO: 4620 - protein, 9 aa, HIV-1
VGGHQAAMQ

SEQ ID NO: 4621 - protein, 15 aa, HIV-1
MMQRGNFRNQRKIVK

SEQ ID NO: 4622 - protein, 9 aa, HIV-1
NFRNQRKIV

SEQ ID NO: 4623 - protein, 15 aa, HIV-1
MMQRGNFRNQRKIVK

SEQ ID NO: 4624 - protein, 9 aa, HIV-1
QRGNFRNQR

SEQ ID NO: 4625 - protein, 15 aa, HIV-1
MMQRGNFRNQRKIVK

SEQ ID NO: 4626 - protein, 9 aa, HIV-1
RGNFRNQRK

SEQ ID NO: 4627 - protein, 15 aa, HIV-1
MQRGNFRNQRKIVKC

SEQ ID NO: 4628 - protein, 9 aa, HIV-1
FRNQRKIVK

SEQ ID NO: 4629 - protein, 15 aa, HIV-1
MSQVTNSATIMMQRG

SEQ ID NO: 4630 - protein, 9 aa, HIV-1
VTNSATIMM

SEQ ID NO: 4631 - protein, 15 aa, HIV-1
MTETLLVQNANPDCK

SEQ ID NO: 4632 - protein, 9 aa, HIV-1
LLVQNANPD

SEQ ID NO: 4633 - protein, 15 aa, HIV-1
MTETLLVQNANPDCK

SEQ ID NO: 4634 - protein, 9 aa, HIV-1
MTETLLVQN

SEQ ID NO: 4635 - protein, 15 aa, HIV-1
MTNNPPIPVGEIYKR

SEQ ID NO: 4636 - protein, 9 aa, HIV-1
MTNNPPIPV

SEQ ID NO: 4637 - protein, 15 aa, HIV-1
MVHQAISPRTLNAWV

SEQ ID NO: 4638 - protein, 9 aa, HIV-1
MVHQAISPR

SEQ ID NO: 4639 - protein, 15 aa, HIV-1
MVHQAISPRTLNAWV

SEQ ID NO: 4640 - protein, 9 aa, HIV-1
VHQAISPRT

SEQ ID NO: 4641 - protein, 15 aa, HIV-1
NFLGKIWPSYKGRPG

SEQ ID NO: 4642 - protein, 9 aa, HIV-1
FLGKIWPSY

SEQ ID NO: 4643 - protein, 15 aa, HIV-1
NFLGKIWPSYKGRPG

SEQ ID NO: 4644 - protein, 9 aa, HIV-1
GKIWPSYKG

SEQ ID NO: 4645 - protein, 15 aa, HIV-1
NFLGKIWPSYKGRPG

SEQ ID NO: 4646 - protein, 9 aa, HIV-1
LGKIWPSYK

SEQ ID NO: 4647 - protein, 15 aa, HIV-1
NFLQSRPEPTAPPEE

SEQ ID NO: 4648 - protein, 9 aa, HIV-1
FLQSRPEPT

SEQ ID NO: 4649 - protein, 15 aa, HIV-1
NFRNQRKIVKCFNCG

SEQ ID NO: 4650 - protein, 9 aa, HIV-1
FRNQRKIVK

SEQ ID NO: 4651 - protein, 15 aa, HIV-1
NIQGQMVHQAISPRT

SEQ ID NO: 4652 - protein, 9 aa, HIV-1
IQGQMVHQA

SEQ ID NO: 4653 - protein, 15 aa, HIV-1
NIQGQMVHQAISPRT

SEQ ID NO: 4654 - protein, 9 aa, HIV-1
MVHQAISPR

SEQ ID NO: 4655 - protein, 15 aa, HIV-1
NKIVRMYSPTSILDI

SEQ ID NO: 4656 - protein, 9 aa, HIV-1
IVRMYSPTS

SEQ ID NO: 4657 - protein, 15 aa, HIV-1
NKIVRMYSPTSILDI

SEQ ID NO: 4658 - protein, 9 aa, HIV-1
VRMYSPTSI

SEQ ID NO: 4659 - protein, 15 aa, HIV-1
NPDCKTILKALGPAA

SEQ ID NO: 4660 - protein, 9 aa, HIV-1
CKTILKALG

SEQ ID NO: 4661 - protein, 15 aa, HIV-1
NPDCKTILKALGPAA

SEQ ID NO: 4662 - protein, 9 aa, HIV-1
KTILKALGP

SEQ ID NO: 4663 - protein, 15 aa, HIV-1
NSATIMMQRGNFRNQ

SEQ ID NO: 4664 - protein, 9 aa, HIV-1
IMMQRGNFR

SEQ ID NO: 4665 - protein, 15 aa, HIV-1
NTMLNTVGGHQAAMQ

SEQ ID NO: 4666 - protein, 9 aa, HIV-1
LNTVGGHQA

SEQ ID NO: 4667 - protein, 15 aa, HIV-1
NTMLNTVGGHQAAMQ

SEQ ID NO: 4668 - protein, 9 aa, HIV-1
MLNTVGGHQ

SEQ ID NO: 4669 - protein, 15 aa, HIV-1
NTVGGHQAAMQMLKE

SEQ ID NO: 4670 - protein, 9 aa, HIV-1
VGGHQAAMQ

SEQ ID NO: 4671 - protein, 15 aa, HIV-1
NYPIVQNIQGQMVHQ

SEQ ID NO: 4672 - protein, 9 aa, HIV-1
VQNIQGQMV

SEQ ID NO: 4673 - protein, 15 aa, HIV-1
PDCKTILKALGPAAT

SEQ ID NO: 4674 - protein, 9 aa, HIV-1
CKTILKALG

SEQ ID NO: 4675 - protein, 15 aa, HIV-1
PDCKTILKALGPAAT

SEQ ID NO: 4676 - protein, 9 aa, HIV-1
ILKALGPAA

SEQ ID NO: 4677 - protein, 15 aa, HIV-1
PEESFRSGVETTTPP

SEQ ID NO: 4678 - protein, 9 aa, HIV-1
FRSGVETTT

SEQ ID NO: 4679 - protein, 15 aa, HIV-1
PEVIPMFSALSEGAT

SEQ ID NO: 4680 - protein, 9 aa, HIV-1
VIPMFSALS

SEQ ID NO: 4681 - protein, 15 aa, HIV-1
PGHKARVLAEAMSQV

SEQ ID NO: 4682 - protein, 9 aa, HIV-1
ARVLAEAMS

SEQ ID NO: 4683 - protein, 15 aa, HIV-1
PGNFLQSRPEPTAPP

SEQ ID NO: 4684 - protein, 9 aa, HIV-1
FLQSRPEPT

SEQ ID NO: 4685 - protein, 15 aa, HIV-1
PIDKELYPLTSLRSL

SEQ ID NO: 4686 - protein, 9 aa, HIV-1
LYPLTSLRS

SEQ ID NO: 4687 - protein, 15 aa, HIV-1
PIVQNIQGQMVHQAI

SEQ ID NO: 4688 - protein, 9 aa, HIV-1
VQNIQGQMV

SEQ ID NO: 4689 - protein, 15 aa, HIV-1
PLTSLRSLFGNDPSS

SEQ ID NO: 4690 - protein, 9 aa, HIV-1
LTSLRSLFG

SEQ ID NO: 4691 - protein, 15 aa, HIV-1
PMFSALSEGATPQDL

SEQ ID NO: 4692 - protein, 9 aa, HIV-1
MFSALSEGA

SEQ ID NO: 4693 - protein, 15 aa, HIV-1
PPEESFRSGVETTTP

SEQ ID NO: 4694 - protein, 9 aa, HIV-1
FRSGVETTT

SEQ ID NO: 4695 - protein, 15 aa, HIV-1
PQDLNTMLNTVGGHQ

SEQ ID NO: 4696 - protein, 9 aa, HIV-1
DLNTMLNTV

SEQ ID NO: 4697 - protein, 15 aa, HIV-1
PQDLNTMLNTVGGHQ

SEQ ID NO: 4698 - protein, 9 aa, HIV-1
LNTMLNTVG

SEQ ID NO: 4699 - protein, 15 aa, HIV-1
PRGSDIAGTTSTLQE

SEQ ID NO: 4700 - protein, 9 aa, HIV-1
IAGTTSTLQ

SEQ ID NO: 4701 - protein, 15 aa, HIV-1
PRTLNAWVKVVEEKA

SEQ ID NO: 4702 - protein, 9 aa, HIV-1
LNAWVKVVE

SEQ ID NO: 4703 - protein, 15 aa, HIV-1
PRTLNAWVKVVEEKA

SEQ ID NO: 4704 - protein, 9 aa, HIV-1
TLNAWVKVV

SEQ ID NO: 4705 - protein, 15 aa, HIV-1
PSYKGRPGNFLQSRP

SEQ ID NO: 4706 - protein, 9 aa, HIV-1
YKGRPGNFL

SEQ ID NO: 4707 - protein, 15 aa, HIV-1
PVGEIYKRWIILGLN

SEQ ID NO: 4708 - protein, 9 aa, HIV-1
YKRWIILGL

SEQ ID NO: 4709 - protein, 15 aa, HIV-1
PVHAGPIAPGQMREP

SEQ ID NO: 4710 - protein, 9 aa, HIV-1
VHAGPIAPG

SEQ ID NO: 4711 - protein, 15 aa, HIV-1
PAATLEEMMTACQGV

SEQ ID NO: 4712 - protein, 9 aa, HIV-1
LEEMMTACQ

SEQ ID NO: 4713 - protein, 15 aa, HIV-1
QAISPRTLNAWVKVV

SEQ ID NO: 4714 - protein, 9 aa, HIV-1
ISPRTLNAW

SEQ ID NO: 4715 - protein, 15 aa, HIV-1
QANFLGKIWPSYKGR

SEQ ID NO: 4716 - protein, 9 aa, HIV-1
FLGKIWPSY

SEQ ID NO: 4717 - protein, 15 aa, HIV-1
QANFLGKIWPSYKGR

SEQ ID NO: 4718 - protein, 9 aa, HIV-1
GKIWPSYKG

SEQ ID NO: 4719 - protein, 15 aa, HIV-1
QANFLGKIWPSYKGR

SEQ ID NO: 4720 - protein, 9 aa, HIV-1
LGKIWPSYK

SEQ ID NO: 4721 - protein, 15 aa, HIV-1
QASQEVKNWMTETLL

SEQ ID NO: 4722 - protein, 9 aa, HIV-1
VKNWMTETL

SEQ ID NO: 4723 - protein, 15 aa, HIV-1
QDLNTMLNTVGGHQA

SEQ ID NO: 4724 - protein, 9 aa, HIV-1
LNTMLNTVG

SEQ ID NO: 4725 - protein, 15 aa, HIV-1
QDLNTMLNTVGGHQA

SEQ ID NO: 4726 - protein, 9 aa, HIV-1
MLNTVGGHQ

SEQ ID NO: 4727 - protein, 15 aa, HIV-1
QEQIGWMTNNPPIPV

SEQ ID NO: 4728 - protein, 9 aa, HIV-1
IGWMTNNPP

SEQ ID NO: 4729 - protein, 15 aa, HIV-1
QEVKNWMTETLLVQN

SEQ ID NO: 4730 - protein, 9 aa, HIV-1
VKNWMTETL

SEQ ID NO: 4731 - protein, 15 aa, HIV-1
QGQMVHQAISPRTLN

SEQ ID NO: 4732 - protein, 9 aa, HIV-1
MVHQAISPR

SEQ ID NO: 4733 - protein, 15 aa, HIV-1
QGQMVHQAISPRTLN

SEQ ID NO: 4734 - protein, 9 aa, HIV-1
VHQAISPRT

SEQ ID NO: 4735 - protein, 15 aa, HIV-1
QIGWMTNNPPIPVGE

SEQ ID NO: 4736 - protein, 9 aa, HIV-1
IGWMTNNPP

SEQ ID NO: 4737 - protein, 15 aa, HIV-1
QIGWMTNNPPIPVGE

SEQ ID NO: 4738 - protein, 9 aa, HIV-1
MTNNPPIPV

SEQ ID NO: 4739 - protein, 15 aa, HIV-1
QIGWMTNNPPIPVGE

SEQ ID NO: 4740 - protein, 9 aa, HIV-1
WMTNNPPIP

SEQ ID NO: 4741 - protein, 15 aa, HIV-1
QILGQLQPSLQTGSE

SEQ ID NO: 4742 - protein, 9 aa, HIV-1
GQLQPSLQT

SEQ ID NO: 4743 - protein, 15 aa, HIV-1
QILGQLQPSLQTGSE

SEQ ID NO: 4744 - protein, 9 aa, HIV-1
LGQLQPSLQ

SEQ ID NO: 4745 - protein, 15 aa, HIV-1
QMVHQAISPRTLNAW

SEQ ID NO: 4746 - protein, 9 aa, HIV-1
MVHQAISPR

SEQ ID NO: 4747 - protein, 15 aa, HIV-1
QMVHQAISPRTLNAW

SEQ ID NO: 4748 - protein, 9 aa, HIV-1
VHQAISPRT

SEQ ID NO: 4749 - protein, 15 aa, HIV-1
QNIQGQMVHQAISPR

SEQ ID NO: 4750 - protein, 9 aa, HIV-1
IQGQMVHQA

SEQ ID NO: 4751 - protein, 15 aa, HIV-1
QNYPIVQNIQGQMVH

SEQ ID NO: 4752 - protein, 9 aa, HIV-1
VQNIQGQMV

SEQ ID NO: 4753 - protein, 15 aa, HIV-1
QRGNFRNQRKIVKCF

SEQ ID NO: 4754 - protein, 9 aa, HIV-1
FRNQRKIVK

SEQ ID NO: 4755 - protein, 15 aa, HIV-1
QTGSEELRSLYNTVA

SEQ ID NO: 4756 - protein, 9 aa, HIV-1
SEELRSLYN

SEQ ID NO: 4757 - protein, 15 aa, HIV-1
QVTNSATIMMQRGNF

SEQ ID NO: 4758 - protein, 9 aa, HIV-1
VTNSATIMM

SEQ ID NO: 4759 - protein, 15 aa, HIV-1
RDYVDRFYKTLRAEQ

SEQ ID NO: 4760 - protein, 9 aa, HIV-1
DRFYKTLRA

SEQ ID NO: 4761 - protein, 15 aa, HIV-1
RDYVDRFYKTLRAEQ

SEQ ID NO: 4762 - protein, 9 aa, HIV-1
DYVDRFYKT

SEQ ID NO: 4763 - protein, 15 aa, HIV-1
RDYVDRFYKTLRAEQ

SEQ ID NO: 4764 - protein, 9 aa, HIV-1
VDRFYKTLR

SEQ ID NO: 4765 - protein, 15 aa, HIV-1
RELERFAVNPGLLET

SEQ ID NO: 4766 - protein, 9 aa, HIV-1
FAVNPGLLE

SEQ ID NO: 4767 - protein, 15 aa, HIV-1
RELERFAVNPGLLET

SEQ ID NO: 4768 - protein, 9 aa, HIV-1
LERFAVNPG

SEQ ID NO: 4769 - protein, 15 aa, HIV-1
RFAVNPGLLETSEGC

SEQ ID NO: 4770 - protein, 9 aa, HIV-1
FAVNPGLLE

SEQ ID NO: 4771 - protein, 15 aa, HIV-1
RFAVNPGLLETSEGC

SEQ ID NO: 4772 - protein, 9 aa, HIV-1
VNPGLLETS

SEQ ID NO: 4773 - protein, 15 aa, HIV-1
RFYKTLRAEQASQEV

SEQ ID NO: 4774 - protein, 9 aa, HIV-1
FYKTLRAEQ

SEQ ID NO: 4775 - protein, 15 aa, HIV-1
RFYKTLRAEQASQEV

SEQ ID NO: 4776 - protein, 9 aa, HIV-1
YKTLRAEQA

SEQ ID NO: 4777 - protein, 15 aa, HIV-1
RGNFRNQRKIVKCFN

SEQ ID NO: 4778 - protein, 9 aa, HIV-1
FRNQRKIVK

SEQ ID NO: 4779 - protein, 15 aa, HIV-1
RGSDIAGTTSTLQEQ

SEQ ID NO: 4780 - protein, 9 aa, HIV-1
IAGTTSTLQ

SEQ ID NO: 4781 - protein, 15 aa, HIV-1
RMYSPTSILDIRQGP

SEQ ID NO: 4782 - protein, 9 aa, HIV-1
YSPTSILDI

SEQ ID NO: 4783 - protein, 15 aa, HIV-1
RPGNFLQSRPEPTAP

SEQ ID NO: 4784 - protein, 9 aa, HIV-1
FLQSRPEPT

SEQ ID NO: 4785 - protein, 15 aa, HIV-1
RQANFLGKIWPSYKG

SEQ ID NO: 4786 - protein, 9 aa, HIV-1
FLGKIWPSY

SEQ ID NO: 4787 - protein, 15 aa, HIV-1
RQANFLGKIWPSYKG

SEQ ID NO: 4788 - protein, 9 aa, HIV-1
LGKIWPSYK

SEQ ID NO: 4789 - protein, 15 aa, HIV-1
RQILGQLQPSLQTGS

SEQ ID NO: 4790 - protein, 9 aa, HIV-1
GQLQPSLQT

SEQ ID NO: 4791 - protein, 15 aa, HIV-1
RQILGQLQPSLQTGS

SEQ ID NO: 4792 - protein, 9 aa, HIV-1
LGQLQPSLQ

SEQ ID NO: 4793 - protein, 15 aa, HIV-1
RSGVETTTPPQKQEP

SEQ ID NO: 4794 - protein, 9 aa, HIV-1
VETTTPPQK

SEQ ID NO: 4795 - protein, 15 aa, HIV-1
RSLYNTVATLYCVHQ

SEQ ID NO: 4796 - protein, 9 aa, HIV-1
LYNTVATLY

SEQ ID NO: 4797 - protein, 15 aa, HIV-1
RSLYNTVATLYCVHQ

SEQ ID NO: 4798 - protein, 9 aa, HIV-1
YNTVATLYC

SEQ ID NO: 4799 - protein, 15 aa, HIV-1
RTLNAWVKVVEEKAF

SEQ ID NO: 4800 - protein, 9 aa, HIV-1
LNAWVKVVE

SEQ ID NO: 4801 - protein, 15 aa, HIV-1
RTLNAWVKVVEEKAF

SEQ ID NO: 4802 - protein, 9 aa, HIV-1
TLNAWVKVV

SEQ ID NO: 4803 - protein, 15 aa, HIV-1
RVHPVHAGPIAPGQM

SEQ ID NO: 4804 - protein, 9 aa, HIV-1
VHAGPIAPG

SEQ ID NO: 4805 - protein, 15 aa, HIV-1
RVLAEAMSQVTNSAT

SEQ ID NO: 4806 - protein, 9 aa, HIV-1
AMSQVTNSA

SEQ ID NO: 4807 - protein, 15 aa, HIV-1
RVLAEAMSQVTNSAT

SEQ ID NO: 4808 - protein, 9 aa, HIV-1
LAEAMSQVT

SEQ ID NO: 4809 - protein, 15 aa, HIV-1
RWIILGLNKIVRMYS

SEQ ID NO: 4810 - protein, 9 aa, HIV-1
ILGLNKIVR

SEQ ID NO: 4811 - protein, 15 aa, HIV-1
RWIILGLNKIVRMYS

SEQ ID NO: 4812 - protein, 9 aa, HIV-1
LGLNKIVRM

SEQ ID NO: 4813 - protein, 15 aa, HIV-1
RWIILGLNKIVRMYS

SEQ ID NO: 4814 - protein, 9 aa, HIV-1
WIILGLNKI

SEQ ID NO: 4815 - protein, 15 aa, HIV-1
SATIMMQRGNFRNQR

SEQ ID NO: 4816 - protein, 9 aa, HIV-1
IMMQRGNFR

SEQ ID NO: 4817 - protein, 15 aa, HIV-1
SDIAGTTSTLQEQIG

SEQ ID NO: 4818 - protein, 9 aa, HIV-1
IAGTTSTLQ

SEQ ID NO: 4819 - protein, 15 aa, HIV-1
SEELRSLYNTVATLY

SEQ ID NO: 4820 - protein, 9 aa, HIV-1
LRSLYNTVA

SEQ ID NO: 4821 - protein, 15 aa, HIV-1
SFRSGVETTTPPQKQ

SEQ ID NO: 4822 - protein, 9 aa, HIV-1
FRSGVETTT

SEQ ID NO: 4823 - protein, 15 aa, HIV-1
SFRSGVETTTPPQKQ

SEQ ID NO: 4824 - protein, 9 aa, HIV-1
VETTTPPQK

SEQ ID NO: 4825 - protein, 15 aa, HIV-1
SGVETTTPPQKQEPI

SEQ ID NO: 4826 - protein, 9 aa, HIV-1
VETTTPPQK

SEQ ID NO: 4827 - protein, 15 aa, HIV-1
SLYNTVATLYCVHQR

SEQ ID NO: 4828 - protein, 9 aa, HIV-1
LYNTVATLY

SEQ ID NO: 4829 - protein, 15 aa, HIV-1
SLYNTVATLYCVHQR

SEQ ID NO: 4830 - protein, 9 aa, HIV-1
YNTVATLYC

SEQ ID NO: 4831 - protein, 15 aa, HIV-1
SPEVIPMFSALSEGA

SEQ ID NO: 4832 - protein, 9 aa, HIV-1
VIPMFSALS

SEQ ID NO: 4833 - protein, 15 aa, HIV-1
SPRTLNAWVKVVEEK

SEQ ID NO: 4834 - protein, 9 aa, HIV-1
LNAWVKVVE

SEQ ID NO: 4835 - protein, 15 aa, HIV-1
SPRTLNAWVKVVEEK

SEQ ID NO: 4836 - protein, 9 aa, HIV-1
TLNAWVKVV

SEQ ID NO: 4837 - protein, 15 aa, HIV-1
SQEVKNWMTETLLVQ

SEQ ID NO: 4838 - protein, 9 aa, HIV-1
VKNWMTETL

SEQ ID NO: 4839 - protein, 15 aa, HIV-1
SQNYPIVQNIQGQMV

SEQ ID NO: 4840 - protein, 9 aa, HIV-1
IVQNIQGQM

SEQ ID NO: 4841 - protein, 15 aa, HIV-1
SQNYPIVQNIQGQMV

SEQ ID NO: 4842 - protein, 9 aa, HIV-1
SQNYPIVQN

SEQ ID NO: 4843 - protein, 15 aa, HIV-1
SQVTNSATIMMQRGN

SEQ ID NO: 4844 - protein, 9 aa, HIV-1
VTNSATIMM

SEQ ID NO: 4845 - protein, 15 aa, HIV-1
SRELERFAVNPGLLE

SEQ ID NO: 4846 - protein, 9 aa, HIV-1
LERFAVNPG

SEQ ID NO: 4847 - protein, 15 aa, HIV-1
STLQEQIGWMTNNPP

SEQ ID NO: 4848 - protein, 9 aa, HIV-1
LQEQIGWMT

SEQ ID NO: 4849 - protein, 15 aa, HIV-1
STLQEQIGWMTNNPP

SEQ ID NO: 4850 - protein, 9 aa, HIV-1
QIGWMTNNP

SEQ ID NO: 4851 - protein, 15 aa, HIV-1
SYKGRPGNFLQSRPE

SEQ ID NO: 4852 - protein, 9 aa, HIV-1
YKGRPGNFL

SEQ ID NO: 4853 - protein, 15 aa, HIV-1
TERQANFLGKIWPSY

SEQ ID NO: 4854 - protein, 9 aa, HIV-1
ANFLGKIWP

SEQ ID NO: 4855 - protein, 15 aa, HIV-1
TETLLVQNANPDCKT

SEQ ID NO: 4856 - protein, 9 aa, HIV-1
VQNANPDCK

SEQ ID NO: 4857 - protein, 15 aa, HIV-1
TGSEELRSLYNTVAT

SEQ ID NO: 4858 - protein, 9 aa, HIV-1
LRSLYNTVA

SEQ ID NO: 4859 - protein, 15 aa, HIV-1
TILKALGPAATLEEM

SEQ ID NO: 4860 - protein, 9 aa, HIV-1
LKALGPAAT

SEQ ID NO: 4861 - protein, 15 aa, HIV-1
TIMMQRGNFRNQRKI

SEQ ID NO: 4862 - protein, 9 aa, HIV-1
IMMQRGNFR

SEQ ID NO: 4863 - protein, 15 aa, HIV-1
TLEEMMTACQGVGGP

SEQ ID NO: 4864 - protein, 9 aa, HIV-1
MTACQGVGG

SEQ ID NO: 4865 - protein, 15 aa, HIV-1
TLLVQNANPDCKTIL

SEQ ID NO: 4866 - protein, 9 aa, HIV-1
VQNANPDCK

SEQ ID NO: 4867 - protein, 15 aa, HIV-1
TLNAWVKVVEEKAFS

SEQ ID NO: 4868 - protein, 9 aa, HIV-1
LNAWVKVVE

SEQ ID NO: 4869 - protein, 15 aa, HIV-1
TLQEQIGWMTNNPPI

SEQ ID NO: 4870 - protein, 9 aa, HIV-1
IGWMTNNPP

SEQ ID NO: 4871 - protein, 15 aa, HIV-1
TMLNTVGGHQAAMQM

SEQ ID NO: 4872 - protein, 9 aa, HIV-1
MLNTVGGHQ

SEQ ID NO: 4873 - protein, 15 aa, HIV-1
TMLNTVGGHQAAMQM

SEQ ID NO: 4874 - protein, 9 aa, HIV-1
VGGHQAAMQ

SEQ ID NO: 4875 - protein, 15 aa, HIV-1
TNSATIMMQRGNFRN

SEQ ID NO: 4876 - protein, 9 aa, HIV-1
IMMQRGNFR

SEQ ID NO: 4877 - protein, 15 aa, HIV-1
TPQDLNTMLNTVGGH

SEQ ID NO: 4878 - protein, 9 aa, HIV-1
LNTMLNTVG

SEQ ID NO: 4879 - protein, 15 aa, HIV-1
TSTLQEQIGWMTNNP

SEQ ID NO: 4880 - protein, 9 aa, HIV-1
LQEQIGWMT

SEQ ID NO: 4881 - protein, 15 aa, HIV-1
TTSTLQEQIGWMTNN

SEQ ID NO: 4882 - protein, 9 aa, HIV-1
LQEQIGWMT

SEQ ID NO: 4883 - protein, 15 aa, HIV-1
TVGGHQAAMQMLKET

SEQ ID NO: 4884 - protein, 9 aa, HIV-1
VGGHQAAMQ

SEQ ID NO: 4885 - protein, 15 aa, HIV-1
VDRFYKTLRAEQASQ

SEQ ID NO: 4886 - protein, 9 aa, HIV-1
DRFYKTLRA

SEQ ID NO: 4887 - protein, 15 aa, HIV-1
VDRFYKTLRAEQASQ

SEQ ID NO: 4888 - protein, 9 aa, HIV-1
FYKTLRAEQ

SEQ ID NO: 4889 - protein, 15 aa, HIV-1
VDRFYKTLRAEQASQ

SEQ ID NO: 4890 - protein, 9 aa, HIV-1
YKTLRAEQA

SEQ ID NO: 4891 - protein, 15 aa, HIV-1
VGEIYKRWIILGLNK

SEQ ID NO: 4892 - protein, 9 aa, HIV-1
YKRWIILGL

SEQ ID NO: 4893 - protein, 15 aa, HIV-1
VGGHQAAMQMLKETI

SEQ ID NO: 4894 - protein, 9 aa, HIV-1
VGGHQAAMQ

SEQ ID NO: 4895 - protein, 15 aa, HIV-1
VHAGPIAPGQMREPR

SEQ ID NO: 4896 - protein, 9 aa, HIV-1
VHAGPIAPG

SEQ ID NO: 4897 - protein, 15 aa, HIV-1
VHPVHAGPIAPGQMR

SEQ ID NO: 4898 - protein, 9 aa, HIV-1
VHAGPIAPG

SEQ ID NO: 4899 - protein, 15 aa, HIV-1
VHQAISPRTLNAWVK

SEQ ID NO: 4900 - protein, 9 aa, HIV-1
VHQAISPRT

SEQ ID NO: 4901 - protein, 15 aa, HIV-1
VIPMFSALSEGATPQ

SEQ ID NO: 4902 - protein, 9 aa, HIV-1
MFSALSEGA

SEQ ID NO: 4903 - protein, 15 aa, HIV-1
VIPMFSALSEGATPQ

SEQ ID NO: 4904 - protein, 9 aa, HIV-1
VIPMFSALS

SEQ ID NO: 4905 - protein, 15 aa, HIV-1
VKNWMTETLLVQNAN

SEQ ID NO: 4906 - protein, 9 aa, HIV-1
NWMTETLLV

SEQ ID NO: 4907 - protein, 15 aa, HIV-1
VKNWMTETLLVQNAN

SEQ ID NO: 4908 - protein, 9 aa, HIV-1
WMTETLLVQ

SEQ ID NO: 4909 - protein, 15 aa, HIV-1
VLAEAMSQVTNSATI

SEQ ID NO: 4910 - protein, 9 aa, HIV-1
AMSQVTNSA

SEQ ID NO: 4911 - protein, 15 aa, HIV-1
VLAEAMSQVTNSATI

SEQ ID NO: 4912 - protein, 9 aa, HIV-1
LAEAMSQVT

SEQ ID NO: 4913 - protein, 15 aa, HIV-1
VQNIQGQMVHQAISP

SEQ ID NO: 4914 - protein, 9 aa, HIV-1
IQGQMVHQA

SEQ ID NO: 4915 - protein, 15 aa, HIV-1
VRMYSPTSILDIRQG

SEQ ID NO: 4916 - protein, 9 aa, HIV-1
MYSPTSILD

SEQ ID NO: 4917 - protein, 15 aa, HIV-1
VRMYSPTSILDIRQG

SEQ ID NO: 4918 - protein, 9 aa, HIV-1
VRMYSPTSI

SEQ ID NO: 4919 - protein, 15 aa, HIV-1
VRMYSPTSILDIRQG

SEQ ID NO: 4920 - protein, 9 aa, HIV-1
YSPTSILDI

SEQ ID NO: 4921 - protein, 15 aa, HIV-1
VTNSATIMMQRGNFR

SEQ ID NO: 4922 - protein, 9 aa, HIV-1
SATIMMQRG

SEQ ID NO: 4923 - protein, 15 aa, HIV-1
VTNSATIMMQRGNFR

SEQ ID NO: 4924 - protein, 9 aa, HIV-1
VTNSATIMM

SEQ ID NO: 4925 - protein, 15 aa, HIV-1
WDRVHPVHAGPIAPG

SEQ ID NO: 4926 - protein, 9 aa, HIV-1
VHPVHAGPI

SEQ ID NO: 4927 - protein, 15 aa, HIV-1
WIILGLNKIVRMYSP

SEQ ID NO: 4928 - protein, 9 aa, HIV-1
ILGLNKIVR

SEQ ID NO: 4929 - protein, 15 aa, HIV-1
WIILGLNKIVRMYSP

SEQ ID NO: 4930 - protein, 9 aa, HIV-1
LGLNKIVRM

SEQ ID NO: 4931 - protein, 15 aa, HIV-1
WIILGLNKIVRMYSP

SEQ ID NO: 4932 - protein, 9 aa, HIV-1
LNKIVRMYS

SEQ ID NO: 4933 - protein, 15 aa, HIV-1
WIILGLNKIVRMYSP

SEQ ID NO: 4934 - protein, 9 aa, HIV-1
WIILGLNKI

SEQ ID NO: 4935 - protein, 15 aa, HIV-1
WMTNNPPIPVGEIYK

SEQ ID NO: 4936 - protein, 9 aa, HIV-1
MTNNPPIPV

SEQ ID NO: 4937 - protein, 15 aa, HIV-1
WPSYKGRPGNFLQSR

SEQ ID NO: 4938 - protein, 9 aa, HIV-1
YKGRPGNFL

SEQ ID NO: 4939 - protein, 15 aa, HIV-1
YKGRPGNFLQSRPEP

SEQ ID NO: 4940 - protein, 9 aa, HIV-1
YKGRPGNFL

SEQ ID NO: 4941 - protein, 15 aa, HIV-1
YKLKHIVWASRELER

SEQ ID NO: 4942 - protein, 9 aa, HIV-1
LKHIVWASR

SEQ ID NO: 4943 - protein, 15 aa, HIV-1
YKRWIILGLNKIVRM

SEQ ID NO: 4944 - protein, 9 aa, HIV-1
ILGLNKIVR

SEQ ID NO: 4945 - protein, 15 aa, HIV-1
YKRWIILGLNKIVRM

SEQ ID NO: 4946 - protein, 9 aa, HIV-1
WIILGLNKI

SEQ ID NO: 4947 - protein, 15 aa, HIV-1
YKTLRAEQASQEVKN

SEQ ID NO: 4948 - protein, 9 aa, HIV-1
YKTLRAEQA

SEQ ID NO: 4949 - protein, 15 aa, HIV-1
YNTVATLYCVHQRIE

SEQ ID NO: 4950 - protein, 9 aa, HIV-1
YNTVATLYC

SEQ ID NO: 4951 - protein, 15 aa, HIV-1
YPIVQNIQGQMVHQA

SEQ ID NO: 4952 - protein, 9 aa, HIV-1
VQNIQGQMV

SEQ ID NO: 4953 - protein, 15 aa, HIV-1
YPLTSLRSLFGNDPS

SEQ ID NO: 4954 - protein, 9 aa, HIV-1
LTSLRSLFG

SEQ ID NO: 4955 - protein, 15 aa, HIV-1
YVDRFYKTLRAEQAS

SEQ ID NO: 4956 - protein, 9 aa, HIV-1
DRFYKTLRA

SEQ ID NO: 4957 - protein, 15 aa, HIV-1
YVDRFYKTLRAEQAS

SEQ ID NO: 4958 - protein, 9 aa, HIV-1
FYKTLRAEQ

SEQ ID NO: 4959 - protein, 15 aa, HIV-1
YVDRFYKTLRAEQAS

SEQ ID NO: 4960 - protein, 9 aa, HIV-1
YKTLRAEQA

SEQ ID NO: 4961 - protein, 15 aa, HIV-1
AATLEEMMTACQGVG

SEQ ID NO: 4962 - protein, 9 aa, HIV-1
LEEMMTACQ

SEQ ID NO: 4963 - protein, 8 aa, HIV-1
MENRWQVM

SEQ ID NO: 4964 - protein, 8 aa, HIV-1
RWQVMIVW

SEQ ID NO: 4965 - protein, 8 aa, HIV-1
WQVMIVWQ

SEQ ID NO: 4966 - protein, 8 aa, HIV-1
QVMIVWQV

SEQ ID NO: 4967 - protein, 8 aa, HIV-1
MIVWQVDR

SEQ ID NO: 4968 - protein, 8 aa, HIV-1
IVWQVDRM

SEQ ID NO: 4969 - protein, 8 aa, HIV-1
WQVDRMRI

SEQ ID NO: 4970 - protein, 8 aa, HIV-1
RMRIRTWK

SEQ ID NO: 4971 - protein, 8 aa, HIV-1
RIRTWKSL

SEQ ID NO: 4972 - protein, 8 aa, HIV-1
RTWKSLVK

SEQ ID NO: 4973 - protein, 8 aa, HIV-1
KSLVKHHM

SEQ ID NO: 4974 - protein, 8 aa, HIV-1
SLVKHHMY

SEQ ID NO: 4975 - protein, 8 aa, HIV-1
LVKHHMYV

SEQ ID NO: 4976 - protein, 8 aa, HIV-1
HMYVSGKA

SEQ ID NO: 4977 - protein, 8 aa, HIV-1
MYVSGKAR

SEQ ID NO: 4978 - protein, 8 aa, HIV-1
VSGKARGW

SEQ ID NO: 4979 - protein, 8 aa, HIV-1
KARGWFYR

SEQ ID NO: 4980 - protein, 8 aa, HIV-1
GWFYRHHY

SEQ ID NO: 4981 - protein, 8 aa, HIV-1
HYESPHPR

SEQ ID NO: 4982 - protein, 8 aa, HIV-1
YESPHPRI

SEQ ID NO: 4983 - protein, 8 aa, HIV-1
SPHPRISS

SEQ ID NO: 4984 - protein, 8 aa, HIV-1
HPRISSEV

SEQ ID NO: 4985 - protein, 8 aa, HIV-1
RISSEVHI

SEQ ID NO: 4986 - protein, 8 aa, HIV-1
HIPLGDAR

SEQ ID NO: 4987 - protein, 8 aa, HIV-1
IPLGDARL

SEQ ID NO: 4988 - protein, 8 aa, HIV-1
PLGDARLV

SEQ ID NO: 4989 - protein, 8 aa, HIV-1
ARLVITTY

SEQ ID NO: 4990 - protein, 8 aa, HIV-1
RLVITTYW

SEQ ID NO: 4991 - protein, 8 aa, HIV-1
VITTYWGL

SEQ ID NO: 4992 - protein, 8 aa, HIV-1
TTYWGLHT

SEQ ID NO: 4993 - protein, 8 aa, HIV-1
HLGQGVSI

SEQ ID NO: 4994 - protein, 8 aa, HIV-1
QGVSIEWR

SEQ ID NO: 4995 - protein, 8 aa, HIV-1
GVSIEWRK

SEQ ID NO: 4996 - protein, 8 aa, HIV-1
VSIEWRKK

SEQ ID NO: 4997 - protein, 8 aa, HIV-1
SIEWRKKR

SEQ ID NO: 4998 - protein, 8 aa, HIV-1
TQVDPELA

SEQ ID NO: 4999 - protein, 8 aa, HIV-1
DPELADQL

SEQ ID NO: 5000 - protein, 8 aa, HIV-1
LADQLIHL

SEQ ID NO: 5001 - protein, 8 aa, HIV-1
DQLIHLYY

SEQ ID NO: 5002 - protein, 8 aa, HIV-1
QLIHLYYF

SEQ ID NO: 5003 - protein, 8 aa, HIV-1
HLYYFDCF

SEQ ID NO: 5004 - protein, 8 aa, HIV-1
DCFSDSAI

SEQ ID NO: 5005 - protein, 8 aa, HIV-1
CFSDSAIR

SEQ ID NO: 5006 - protein, 8 aa, HIV-1
FSDSAIRK

SEQ ID NO: 5007 - protein, 8 aa, HIV-1
KALLGHIV

SEQ ID NO: 5008 - protein, 8 aa, HIV-1
ALLGHIVS

SEQ ID NO: 5009 - protein, 8 aa, HIV-1
LGHIVSPR

SEQ ID NO: 5010 - protein, 8 aa, HIV-1
IVSPRCEY

SEQ ID NO: 5011 - protein, 8 aa, HIV-1
EYQAGHNK

SEQ ID NO: 5012 - protein, 8 aa, HIV-1
YQAGHNKV

SEQ ID NO: 5013 - protein, 8 aa, HIV-1
KVGSLQYL

SEQ ID NO: 5014 - protein, 8 aa, HIV-1
SLQYLALA

SEQ ID NO: 5015 - protein, 8 aa, HIV-1
LQYLALAA

SEQ ID NO: 5016 - protein, 8 aa, HIV-1
QYLALAAL

SEQ ID NO: 5017 - protein, 8 aa, HIV-1
YLALAALI

SEQ ID NO: 5018 - protein, 8 aa, HIV-1
ALAALITP

SEQ ID NO: 5019 - protein, 8 aa, HIV-1
LAALITPK

SEQ ID NO: 5020 - protein, 8 aa, HIV-1
AALITPKK

SEQ ID NO: 5021 - protein, 8 aa, HIV-1
ALITPKKI

SEQ ID NO: 5022 - protein, 8 aa, HIV-1
PLPSVTKL

SEQ ID NO: 5023 - protein, 8 aa, HIV-1
LPSVTKLT

SEQ ID NO: 5024 - protein, 8 aa, HIV-1
VTKLTEDR

SEQ ID NO: 5025 - protein, 8 aa, HIV-1
LTEDRWNK

SEQ ID NO: 5026 - protein, 8 aa, HIV-1
PQKTKGHR

SEQ ID NO: 5027 - protein, 9 aa, HIV-1
WQVMIVWQV

SEQ ID NO: 5028 - protein, 9 aa, HIV-1
VMIVWQVDR

SEQ ID NO: 5029 - protein, 9 aa, HIV-1
MIVWQVDRM

SEQ ID NO: 5030 - protein, 9 aa, HIV-1
IVWQVDRMR

SEQ ID NO: 5031 - protein, 9 aa, HIV-1
VWQVDRMRI

SEQ ID NO: 5032 - protein, 9 aa, HIV-1
WQVDRMRIR

SEQ ID NO: 5033 - protein, 9 aa, HIV-1
RMRIRTWKS

SEQ ID NO: 5034 - protein, 9 aa, HIV-1
RIRTWKSLV

SEQ ID NO: 5035 - protein, 9 aa, HIV-1
IRTWKSLVK

SEQ ID NO: 5036 - protein, 9 aa, HIV-1
RTWKSLVKH

SEQ ID NO: 5037 - protein, 9 aa, HIV-1
KSLVKHHMY

SEQ ID NO: 5038 - protein, 9 aa, HIV-1
SLVKHHMYV

SEQ ID NO: 5039 - protein, 9 aa, HIV-1
KHHMYVSGK

SEQ ID NO: 5040 - protein, 9 aa, HIV-1
HMYVSGKAR

SEQ ID NO: 5041 - protein, 9 aa, HIV-1
SGKARGWFY

SEQ ID NO: 5042 - protein, 9 aa, HIV-1
KARGWFYRH

SEQ ID NO: 5043 - protein, 9 aa, HIV-1
RGWFYRHHY

SEQ ID NO: 5044 - protein, 9 aa, HIV-1
HHYESPHPR

SEQ ID NO: 5045 - protein, 9 aa, HIV-1
SPHPRISSE

SEQ ID NO: 5046 - protein, 9 aa, HIV-1
HPRISSEVH

SEQ ID NO: 5047 - protein, 9 aa, HIV-1
ISSEVHIPL

SEQ ID NO: 5048 - protein, 9 aa, HIV-1
SEVHIPLGD

SEQ ID NO: 5049 - protein, 9 aa, HIV-1
HIPLGDARL

SEQ ID NO: 5050 - protein, 9 aa, HIV-1
IPLGDARLV

SEQ ID NO: 5051 - protein, 9 aa, HIV-1
PLGDARLVI

SEQ ID NO: 5052 - protein, 9 aa, HIV-1
DARLVITTY

SEQ ID NO: 5053 - protein, 9 aa, HIV-1
LVITTYWGL

SEQ ID NO: 5054 - protein, 9 aa, HIV-1
WHLGQGVSI

SEQ ID NO: 5055 - protein, 9 aa, HIV-1
LGQGVSIEW

SEQ ID NO: 5056 - protein, 9 aa, HIV-1
GQGVSIEWR

SEQ ID NO: 5057 - protein, 9 aa, HIV-1
GVSIEWRKK

SEQ ID NO: 5058 - protein, 9 aa, HIV-1
VSIEWRKKR

SEQ ID NO: 5059 - protein, 9 aa, HIV-1
ELADQLIHL

SEQ ID NO: 5060 - protein, 9 aa, HIV-1
LADQLIHLY

SEQ ID NO: 5061 - protein, 9 aa, HIV-1
DQLIHLYYF

SEQ ID NO: 5062 - protein, 9 aa, HIV-1
IHLYYFDCF

SEQ ID NO: 5063 - protein, 9 aa, HIV-1
HLYYFDCFS

SEQ ID NO: 5064 - protein, 9 aa, HIV-1
DCFSDSAIR

SEQ ID NO: 5065 - protein, 9 aa, HIV-1
ALLGHIVSP

SEQ ID NO: 5066 - protein, 9 aa, HIV-1
LLGHIVSPR

SEQ ID NO: 5067 - protein, 9 aa, HIV-1
HIVSPRCEY

SEQ ID NO: 5068 - protein, 9 aa, HIV-1
KVGSLQYLA

SEQ ID NO: 5069 - protein, 9 aa, HIV-1
SLQYLALAA

SEQ ID NO: 5070 - protein, 9 aa, HIV-1
LQYLALAAL

SEQ ID NO: 5071 - protein, 9 aa, HIV-1
QYLALAALI

SEQ ID NO: 5072 - protein, 9 aa, HIV-1
YLALAALIT

SEQ ID NO: 5073 - protein, 9 aa, HIV-1
ALAALITPK

SEQ ID NO: 5074 - protein, 9 aa, HIV-1
LAALITPKK

SEQ ID NO: 5075 - protein, 9 aa, HIV-1
ALITPKKIK

SEQ ID NO: 5076 - protein, 9 aa, HIV-1
TPKKIKPPL

SEQ ID NO: 5077 - protein, 9 aa, HIV-1
KIKPPLPSV

SEQ ID NO: 5078 - protein, 9 aa, HIV-1
SVTKLTEDR

SEQ ID NO: 5079 - protein, 9 aa, HIV-1
VTKLTEDRW

SEQ ID NO: 5080 - protein, 9 aa, HIV-1
KLTEDRWNK

SEQ ID NO: 5081 - protein, 9 aa, HIV-1
RWNKPQKTK

SEQ ID NO: 5082 - protein, 9 aa, HIV-1
KPQKTKGHR

SEQ ID NO: 5083 - protein, 9 aa, HIV-1
KTKGHRGSH

SEQ ID NO: 5084 - protein, 10 aa, HIV-1
MENRWQVMIV

SEQ ID NO: 5085 - protein, 10 aa, HIV-1
RWQVMIVWQV

SEQ ID NO: 5086 - protein, 10 aa, HIV-1
QVMIVWQVDR

SEQ ID NO: 5087 - protein, 10 aa, HIV-1
VMIVWQVDRM

SEQ ID NO: 5088 - protein, 10 aa, HIV-1
MIVWQVDRMR

SEQ ID NO: 5089 - protein, 10 aa, HIV-1
IVWQVDRMRI

SEQ ID NO: 5090 - protein, 10 aa, HIV-1
VWQVDRMRIR

SEQ ID NO: 5091 - protein, 10 aa, HIV-1
WQVDRMRIRT

SEQ ID NO: 5092 - protein, 10 aa, HIV-1
RMRIRTWKSL

SEQ ID NO: 5093 - protein, 10 aa, HIV-1
RIRTWKSLVK

SEQ ID NO: 5094 - protein, 10 aa, HIV-1
KSLVKHHMYV

SEQ ID NO: 5095 - protein, 10 aa, HIV-1
SLVKHHMYVS

SEQ ID NO: 5096 - protein, 10 aa, HIV-1
MYVSGKARGW

SEQ ID NO: 5097 - protein, 10 aa, HIV-1
YVSGKARGWF

SEQ ID NO: 5098 - protein, 10 aa, HIV-1
VSGKARGWFY

SEQ ID NO: 5099 - protein, 10 aa, HIV-1
SGKARGWFYR

SEQ ID NO: 5100 - protein, 10 aa, HIV-1
RHHYESPHPR

SEQ ID NO: 5101 - protein, 10 aa, HIV-1
HHYESPHPRI

SEQ ID NO: 5102 - protein, 10 aa, HIV-1
YESPHPRISS

SEQ ID NO: 5103 - protein, 10 aa, HIV-1
SPHPRISSEV

SEQ ID NO: 5104 - protein, 10 aa, HIV-1
HPRISSEVHI

SEQ ID NO: 5105 - protein, 10 aa, HIV-1
RISSEVHIPL

SEQ ID NO: 5106 - protein, 10 aa, HIV-1
EVHIPLGDAR

SEQ ID NO: 5107 - protein, 10 aa, HIV-1
HIPLGDARLV

SEQ ID NO: 5108 - protein, 10 aa, HIV-1
IPLGDARLVI

SEQ ID NO: 5109 - protein, 10 aa, HIV-1
PLGDARLVIT

SEQ ID NO: 5110 - protein, 10 aa, HIV-1
RLVITTYWGL

SEQ ID NO: 5111 - protein, 10 aa, HIV-1
TTYWGLHTGE

SEQ ID NO: 5112 - protein, 10 aa, HIV-1
TYWGLHTGER

SEQ ID NO: 5113 - protein, 10 aa, HIV-1
HLGQGVSIEW

SEQ ID NO: 5114 - protein, 10 aa, HIV-1
GQGVSIEWRK

SEQ ID NO: 5115 - protein, 10 aa, HIV-1
GVSIEWRKKR

SEQ ID NO: 5116 - protein, 10 aa, HIV-1
VSIEWRKKRY

SEQ ID NO: 5117 - protein, 10 aa, HIV-1
RYSTQVDPEL

SEQ ID NO: 5118 - protein, 10 aa, HIV-1
QVDPELADQL

SEQ ID NO: 5119 - protein, 10 aa, HIV-1
DPELADQLIH

SEQ ID NO: 5120 - protein, 10 aa, HIV-1
PELADQLIHL

SEQ ID NO: 5121 - protein, 10 aa, HIV-1
ELADQLIHLY

SEQ ID NO: 5122 - protein, 10 aa, HIV-1
LADQLIHLYY

SEQ ID NO: 5123 - protein, 10 aa, HIV-1
YYFDCFSDSA

SEQ ID NO: 5124 - protein, 10 aa, HIV-1
YFDCFSDSAI

SEQ ID NO: 5125 - protein, 10 aa, HIV-1
FDCFSDSAIR

SEQ ID NO: 5126 - protein, 10 aa, HIV-1
AIRKALLGHI

SEQ ID NO: 5127 - protein, 10 aa, HIV-1
ALLGHIVSPR

SEQ ID NO: 5128 - protein, 10 aa, HIV-1
LLGHIVSPRC

SEQ ID NO: 5129 - protein, 10 aa, HIV-1
IVSPRCEYQA

SEQ ID NO: 5130 - protein, 10 aa, HIV-1
CEYQAGHNKV

SEQ ID NO: 5131 - protein, 10 aa, HIV-1
KVGSLQYLAL

SEQ ID NO: 5132 - protein, 10 aa, HIV-1
SLQYLALAAL

SEQ ID NO: 5133 - protein, 10 aa, HIV-1
LQYLALAALI

SEQ ID NO: 5134 - protein, 10 aa, HIV-1
YLALAALITP

SEQ ID NO: 5135 - protein, 10 aa, HIV-1
LALAALITPK

SEQ ID NO: 5136 - protein, 10 aa, HIV-1
ALAALITPKK

SEQ ID NO: 5137 - protein, 10 aa, HIV-1
AALITPKKIK

SEQ ID NO: 5138 - protein, 10 aa, HIV-1
KKIKPPLPSV

SEQ ID NO: 5139 - protein, 10 aa, HIV-1
KPPLPSVTKL

SEQ ID NO: 5140 - protein, 10 aa, HIV-1
KTKGHRGSHT

SEQ ID NO: 5141 - protein, 11 aa, HIV-1
MENRWQVMIVW

SEQ ID NO: 5142 - protein, 11 aa, HIV-1
NRWQVMIVWQV

SEQ ID NO: 5143 - protein, 11 aa, HIV-1
WQVMIVWQVDR

SEQ ID NO: 5144 - protein, 11 aa, HIV-1
QVMIVWQVDRM

SEQ ID NO: 5145 - protein, 11 aa, HIV-1
VMIVWQVDRMR

SEQ ID NO: 5146 - protein, 11 aa, HIV-1
MIVWQVDRMRI

SEQ ID NO: 5147 - protein, 11 aa, HIV-1
IVWQVDRMRIR

SEQ ID NO: 5148 - protein, 11 aa, HIV-1
WQVDRMRIRTW

SEQ ID NO: 5149 - protein, 11 aa, HIV-1
QVDRMRIRTWK

SEQ ID NO: 5150 - protein, 11 aa, HIV-1
RMRIRTWKSLV

SEQ ID NO: 5151 - protein, 11 aa, HIV-1
MRIRTWKSLVK

SEQ ID NO: 5152 - protein, 11 aa, HIV-1
RIRTWKSLVKH

SEQ ID NO: 5153 - protein, 11 aa, HIV-1
RTWKSLVKHHM

SEQ ID NO: 5154 - protein, 11 aa, HIV-1
TWKSLVKHHMY

SEQ ID NO: 5155 - protein, 11 aa, HIV-1
WKSLVKHHMYV

SEQ ID NO: 5156 - protein, 11 aa, HIV-1
LVKHHMYVSGK

SEQ ID NO: 5157 - protein, 11 aa, HIV-1
KHHMYVSGKAR

SEQ ID NO: 5158 - protein, 11 aa, HIV-1
HMYVSGKARGW

SEQ ID NO: 5159 - protein, 11 aa, HIV-1
MYVSGKARGWF

SEQ ID NO: 5160 - protein, 11 aa, HIV-1
YVSGKARGWFY

SEQ ID NO: 5161 - protein, 11 aa, HIV-1
VSGKARGWFYR

SEQ ID NO: 5162 - protein, 11 aa, HIV-1
KARGWFYRHHY

SEQ ID NO: 5163 - protein, 11 aa, HIV-1
ESPHPRISSEV

SEQ ID NO: 5164 - protein, 11 aa, HIV-1
EVHIPLGDARL

SEQ ID NO: 5165 - protein, 11 aa, HIV-1
IPLGDARLVIT

SEQ ID NO: 5166 - protein, 11 aa, HIV-1
PLGDARLVITT

SEQ ID NO: 5167 - protein, 11 aa, HIV-1
ARLVITTYWGL

SEQ ID NO: 5168 - protein, 11 aa, HIV-1
RLVITTYWGLH

SEQ ID NO: 5169 - protein, 11 aa, HIV-1
LVITTYWGLHT

SEQ ID NO: 5170 - protein, 11 aa, HIV-1
TTYWGLHTGER

SEQ ID NO: 5171 - protein, 11 aa, HIV-1
YWGLHTGERDW

SEQ ID NO: 5172 - protein, 11 aa, HIV-1
GLHTGERDWHL

SEQ ID NO: 5173 - protein, 11 aa, HIV-1
WHLGQGVSIEW

SEQ ID NO: 5174 - protein, 11 aa, HIV-1
HLGQGVSIEWR

SEQ ID NO: 5175 - protein, 11 aa, HIV-1
KRYSTQVDPEL

SEQ ID NO: 5176 - protein, 11 aa, HIV-1
TQVDPELADQL

SEQ ID NO: 5177 - protein, 11 aa, HIV-1
QVDPELADQLI

SEQ ID NO: 5178 - protein, 11 aa, HIV-1
DPELADQLIHL

SEQ ID NO: 5179 - protein, 11 aa, HIV-1
PELADQLIHLY

SEQ ID NO: 5180 - protein, 11 aa, HIV-1
ELADQLIHLYY

SEQ ID NO: 5181 - protein, 11 aa, HIV-1
LADQLIHLYYF

SEQ ID NO: 5182 - protein, 11 aa, HIV-1
QLIHLYYFDCF

SEQ ID NO: 5183 - protein, 11 aa, HIV-1
YYFDCFSDSAI

SEQ ID NO: 5184 - protein, 11 aa, HIV-1
AIRKALLGHIV

SEQ ID NO: 5185 - protein, 11 aa, HIV-1
KALLGHIVSPR

SEQ ID NO: 5186 - protein, 11 aa, HIV-1
ALLGHIVSPRC

SEQ ID NO: 5187 - protein, 11 aa, HIV-1
HIVSPRCEYQA

SEQ ID NO: 5188 - protein, 11 aa, HIV-1
YQAGHNKVGSL

SEQ ID NO: 5189 - protein, 11 aa, HIV-1
KVGSLQYLALA

SEQ ID NO: 5190 - protein, 11 aa, HIV-1
GSLQYLALAAL

SEQ ID NO: 5191 - protein, 11 aa, HIV-1
SLQYLALAALI

SEQ ID NO: 5192 - protein, 11 aa, HIV-1
LQYLALAALIT

SEQ ID NO: 5193 - protein, 11 aa, HIV-1
YLALAALITPK

SEQ ID NO: 5194 - protein, 11 aa, HIV-1
LALAALITPKK

SEQ ID NO: 5195 - protein, 11 aa, HIV-1
ALAALITPKKI

SEQ ID NO: 5196 - protein, 11 aa, HIV-1
LAALITPKKIK

SEQ ID NO: 5197 - protein, 11 aa, HIV-1
LITPKKIKPPL

SEQ ID NO: 5198 - protein, 11 aa, HIV-1
KIKPPLPSVTK

SEQ ID NO: 5199 - protein, 11 aa, HIV-1
VTKLTEDRWNK

SEQ ID NO: 5200 - protein, 11 aa, HIV-1
KLTEDRWNKPQ

SEQ ID NO: 5201 - protein, 11 aa, HIV-1
LTEDRWNKPQK

SEQ ID NO: 5202 - protein, 11 aa, HIV-1
KTKGHRGSHTM

SEQ ID NO: 5203 - protein, 15 aa, HIV-1
ADQLIHLYYFDCFSD

SEQ ID NO: 5204 - protein, 9 aa, HIV-1
IHLYYFDCF

SEQ ID NO: 5205 - protein, 15 aa, HIV-1
AGHNKVGSLQYLALA

SEQ ID NO: 5206 - protein, 9 aa, HIV-1
VGSLQYLAL

SEQ ID NO: 5207 - protein, 15 aa, HIV-1
AIRKALLGHIVSPRC

SEQ ID NO: 5208 - protein, 9 aa, HIV-1
LLGHIVSPR

SEQ ID NO: 5209 - protein, 15 aa, HIV-1
AIRKALLGHIVSPRC

SEQ ID NO: 5210 - protein, 9 aa, HIV-1
RKALLGHIV

SEQ ID NO: 5211 - protein, 15 aa, HIV-1
ALLGHIVSPRCEYQA

SEQ ID NO: 5212 - protein, 9 aa, HIV-1
LLGHIVSPR

SEQ ID NO: 5213 - protein, 15 aa, HIV-1
ARLVITTYWGLHTGE

SEQ ID NO: 5214 - protein, 9 aa, HIV-1
LVITTYWGL

SEQ ID NO: 5215 - protein, 15 aa, HIV-1
ARLVITTYWGLHTGE

SEQ ID NO: 5216 - protein, 9 aa, HIV-1
VITTYWGLH

SEQ ID NO: 5217 - protein, 15 aa, HIV-1
CEYQAGHNKVGSLQY

SEQ ID NO: 5218 - protein, 9 aa, HIV-1
YQAGHNKVG

SEQ ID NO: 5219 - protein, 15 aa, HIV-1
CFSDSAIRKALLGHI

SEQ ID NO: 5220 - protein, 9 aa, HIV-1
AIRKALLGH

SEQ ID NO: 5221 - protein, 15 aa, HIV-1
DARLVITTYWGLHTG

SEQ ID NO: 5222 - protein, 9 aa, HIV-1
LVITTYWGL

SEQ ID NO: 5223 - protein, 15 aa, HIV-1
DARLVITTYWGLHTG

SEQ ID NO: 5224 - protein, 9 aa, HIV-1
VITTYWGLH

SEQ ID NO: 5225 - protein, 15 aa, HIV-1
DQLIHLYYFDCFSDS

SEQ ID NO: 5226 - protein, 9 aa, HIV-1
IHLYYFDCF

SEQ ID NO: 5227 - protein, 15 aa, HIV-1
DRMRIRTWKSLVKHH

SEQ ID NO: 5228 - protein, 9 aa, HIV-1
IRTWKSLVK

SEQ ID NO: 5229 - protein, 15 aa, HIV-1
DSAIRKALLGHIVSP

SEQ ID NO: 5230 - protein, 9 aa, HIV-1
AIRKALLGH

SEQ ID NO: 5231 - protein, 15 aa, HIV-1
DSAIRKALLGHIVSP

SEQ ID NO: 5232 - protein, 9 aa, HIV-1
IRKALLGHI

SEQ ID NO: 5233 - protein, 15 aa, HIV-1
DWHLGQGVSIEWRKK

SEQ ID NO: 5234 - protein, 9 aa, HIV-1
LGQGVSIEW

SEQ ID NO: 5235 - protein, 15 aa, HIV-1
ELADQLIHLYYFDCF

SEQ ID NO: 5236 - protein, 9 aa, HIV-1
LIHLYYFDC

SEQ ID NO: 5237 - protein, 15 aa, HIV-1
ENRWQVMIVWQVDRM

SEQ ID NO: 5238 - protein, 9 aa, HIV-1
NRWQVMIVW

SEQ ID NO: 5239 - protein, 15 aa, HIV-1
ENRWQVMIVWQVDRM

SEQ ID NO: 5240 - protein, 9 aa, HIV-1
VMIVWQVDR

SEQ ID NO: 5241 - protein, 15 aa, HIV-1
ENRWQVMIVWQVDRM

SEQ ID NO: 5242 - protein, 9 aa, HIV-1
WQVMIVWQV

SEQ ID NO: 5243 - protein, 15 aa, HIV-1
ERDWHLGQGVSIEWR

SEQ ID NO: 5244 - protein, 9 aa, HIV-1
WHLGQGVSI

SEQ ID NO: 5245 - protein, 15 aa, HIV-1
EVHIPLGDARLVITT

SEQ ID NO: 5246 - protein, 9 aa, HIV-1
IPLGDARLV

SEQ ID NO: 5247 - protein, 15 aa, HIV-1
EYQAGHNKVGSLQYL

SEQ ID NO: 5248 - protein, 9 aa, HIV-1
YQAGHNKVG

SEQ ID NO: 5249 - protein, 15 aa, HIV-1
FSDSAIRKALLGHIV

SEQ ID NO: 5250 - protein, 9 aa, HIV-1
AIRKALLGH

SEQ ID NO: 5251 - protein, 15 aa, HIV-1
FSDSAIRKALLGHIV

SEQ ID NO: 5252 - protein, 9 aa, HIV-1
IRKALLGHI

SEQ ID NO: 5253 - protein, 15 aa, HIV-1
FYRHHYESPHPRISS

SEQ ID NO: 5254 - protein, 9 aa, HIV-1
YESPHPRIS

SEQ ID NO: 5255 - protein, 15 aa, HIV-1
GDARLVITTYWGLHT

SEQ ID NO: 5256 - protein, 9 aa, HIV-1
LVITTYWGL

SEQ ID NO: 5257 - protein, 15 aa, HIV-1
GDARLVITTYWGLHT

SEQ ID NO: 5258 - protein, 9 aa, HIV-1
VITTYWGLH

SEQ ID NO: 5259 - protein, 15 aa, HIV-1
GERDWHLGQGVSIEW

SEQ ID NO: 5260 - protein, 9 aa, HIV-1
WHLGQGVSI

SEQ ID NO: 5261 - protein, 15 aa, HIV-1
GHNKVGSLQYLALAA

SEQ ID NO: 5262 - protein, 9 aa, HIV-1
VGSLQYLAL

SEQ ID NO: 5263 - protein, 15 aa, HIV-1
GQGVSIEWRKKRYST

SEQ ID NO: 5264 - protein, 9 aa, HIV-1
VSIEWRKKR

SEQ ID NO: 5265 - protein, 15 aa, HIV-1
GSLQYLALAALITPK

SEQ ID NO: 5266 - protein, 9 aa, HIV-1
LALAALITP

SEQ ID NO: 5267 - protein, 15 aa, HIV-1
GSLQYLALAALITPK

SEQ ID NO: 5268 - protein, 9 aa, HIV-1
YLALAALIT

SEQ ID NO: 5269 - protein, 15 aa, HIV-1
GVSIEWRKKRYSTQV

SEQ ID NO: 5270 - protein, 9 aa, HIV-1
IEWRKKRYS

SEQ ID NO: 5271 - protein, 15 aa, HIV-1
GVSIEWRKKRYSTQV

SEQ ID NO: 5272 - protein, 9 aa, HIV-1
VSIEWRKKR

SEQ ID NO: 5273 - protein, 15 aa, HIV-1
GVSIEWRKKRYSTQV

SEQ ID NO: 5274 - protein, 9 aa, HIV-1
WRKKRYSTQ

SEQ ID NO: 5275 - protein, 15 aa, HIV-1
HHMYVSGKARGWFYR

SEQ ID NO: 5276 - protein, 9 aa, HIV-1
YVSGKARGW

SEQ ID NO: 5277 - protein, 15 aa, HIV-1
HHYESPHPRISSEVH

SEQ ID NO: 5278 - protein, 9 aa, HIV-1
YESPHPRIS

SEQ ID NO: 5279 - protein, 15 aa, HIV-1
HIPLGDARLVITTYW

SEQ ID NO: 5280 - protein, 9 aa, HIV-1
LGDARLVIT

SEQ ID NO: 5281 - protein, 15 aa, HIV-1
HLGQGVSIEWRKKRY

SEQ ID NO: 5282 - protein, 9 aa, HIV-1
VSIEWRKKR

SEQ ID NO: 5283 - protein, 15 aa, HIV-1
HMYVSGKARGWFYRH

SEQ ID NO: 5284 - protein, 9 aa, HIV-1
YVSGKARGW

SEQ ID NO: 5285 - protein, 15 aa, HIV-1
HNKVGSLQYLALAAL

SEQ ID NO: 5286 - protein, 9 aa, HIV-1
VGSLQYLAL

SEQ ID NO: 5287 - protein, 15 aa, HIV-1
IEWRKKRYSTQVDPE

SEQ ID NO: 5288 - protein, 9 aa, HIV-1
WRKKRYSTQ

SEQ ID NO: 5289 - protein, 15 aa, HIV-1
IKPPLPSVTKLTEDR

SEQ ID NO: 5290 - protein, 9 aa, HIV-1
IKPPLPSVT

SEQ ID NO: 5291 - protein, 15 aa, HIV-1
IPLGDARLVITTYWG

SEQ ID NO: 5292 - protein, 9 aa, HIV-1
LGDARLVIT

SEQ ID NO: 5293 - protein, 15 aa, HIV-1
IRKALLGHIVSPRCE

SEQ ID NO: 5294 - protein, 9 aa, HIV-1
LGHIVSPRC

SEQ ID NO: 5295 - protein, 15 aa, HIV-1
IRKALLGHIVSPRCE

SEQ ID NO: 5296 - protein, 9 aa, HIV-1
LLGHIVSPR

SEQ ID NO: 5297 - protein, 15 aa, HIV-1
IRTWKSLVKHHMYVS

SEQ ID NO: 5298 - protein, 9 aa, HIV-1
IRTWKSLVK

SEQ ID NO: 5299 - protein, 15 aa, HIV-1
IRTWKSLVKHHMYVS

SEQ ID NO: 5300 - protein, 9 aa, HIV-1
WKSLVKHHM

SEQ ID NO: 5301 - protein, 15 aa, HIV-1
ISSEVHIPLGDARLV

SEQ ID NO: 5302 - protein, 9 aa, HIV-1
HIPLGDARL

SEQ ID NO: 5303 - protein, 15 aa, HIV-1
ITPKKIKPPLPSVTK

SEQ ID NO: 5304 - protein, 9 aa, HIV-1
IKPPLPSVT

SEQ ID NO: 5305 - protein, 15 aa, HIV-1
ITTYWGLHTGERDWH

SEQ ID NO: 5306 - protein, 9 aa, HIV-1
YWGLHTGER

SEQ ID NO: 5307 - protein, 15 aa, HIV-1
IVWQVDRMRIRTWKS

SEQ ID NO: 5308 - protein, 9 aa, HIV-1
VDRMRIRTW

SEQ ID NO: 5309 - protein, 15 aa, HIV-1
IVWQVDRMRIRTWKS

SEQ ID NO: 5310 - protein, 9 aa, HIV-1
WQVDRMRIR

SEQ ID NO: 5311 - protein, 15 aa, HIV-1
KALLGHIVSPRCEYQ

SEQ ID NO: 5312 - protein, 9 aa, HIV-1
LLGHIVSPR

SEQ ID NO: 5313 - protein, 15 aa, HIV-1
KHHMYVSGKARGWFY

SEQ ID NO: 5314 - protein, 9 aa, HIV-1
YVSGKARGW

SEQ ID NO: 5315 - protein, 15 aa, HIV-1
KIKPPLPSVTKLTED

SEQ ID NO: 5316 - protein, 9 aa, HIV-1
IKPPLPSVT

SEQ ID NO: 5317 - protein, 15 aa, HIV-1
KKIKPPLPSVTKLTE

SEQ ID NO: 5318 - protein, 9 aa, HIV-1
IKPPLPSVT

SEQ ID NO: 5319 - protein, 15 aa, HIV-1
KKRYSTQVDPELADQ

SEQ ID NO: 5320 - protein, 9 aa, HIV-1
TQVDPELAD

SEQ ID NO: 5321 - protein, 15 aa, HIV-1
KSLVKHHMYVSGKAR

SEQ ID NO: 5322 - protein, 9 aa, HIV-1
VKHHMYVSG

SEQ ID NO: 5323 - protein, 15 aa, HIV-1
KVGSLQYLALAALIT

SEQ ID NO: 5324 - protein, 9 aa, HIV-1
LQYLALAAL

SEQ ID NO: 5325 - protein, 15 aa, HIV-1
KVGSLQYLALAALIT

SEQ ID NO: 5326 - protein, 9 aa, HIV-1
QYLALAALI

SEQ ID NO: 5327 - protein, 15 aa, HIV-1
LADQLIHLYYFDCFS

SEQ ID NO: 5328 - protein, 9 aa, HIV-1
IHLYYFDCF

SEQ ID NO: 5329 - protein, 15 aa, HIV-1
LALAALITPKKIKPP

SEQ ID NO: 5330 - protein, 9 aa, HIV-1
LAALITPKK

SEQ ID NO: 5331 - protein, 15 aa, HIV-1
LGDARLVITTYWGLH

SEQ ID NO: 5332 - protein, 9 aa, HIV-1
LGDARLVIT

SEQ ID NO: 5333 - protein, 15 aa, HIV-1
LGDARLVITTYWGLH

SEQ ID NO: 5334 - protein, 9 aa, HIV-1
LVITTYWGL

SEQ ID NO: 5335 - protein, 15 aa, HIV-1
LGQGVSIEWRKKRYS

SEQ ID NO: 5336 - protein, 9 aa, HIV-1
VSIEWRKKR

SEQ ID NO: 5337 - protein, 15 aa, HIV-1
LITPKKIKPPLPSVT

SEQ ID NO: 5338 - protein, 9 aa, HIV-1
KKIKPPLPS

SEQ ID NO: 5339 - protein, 15 aa, HIV-1
LITPKKIKPPLPSVT

SEQ ID NO: 5340 - protein, 9 aa, HIV-1
PKKIKPPLP

SEQ ID NO: 5341 - protein, 15 aa, HIV-1
LLGHIVSPRCEYQAG

SEQ ID NO: 5342 - protein, 9 aa, HIV-1
LLGHIVSPR

SEQ ID NO: 5343 - protein, 15 aa, HIV-1
LQYLALAALITPKKI

SEQ ID NO: 5344 - protein, 9 aa, HIV-1
LALAALITP

SEQ ID NO: 5345 - protein, 15 aa, HIV-1
LQYLALAALITPKKI

SEQ ID NO: 5346 - protein, 9 aa, HIV-1
LAALITPKK

SEQ ID NO: 5347 - protein, 15 aa, HIV-1
LQYLALAALITPKKI

SEQ ID NO: 5348 - protein, 9 aa, HIV-1
YLALAALIT

SEQ ID NO: 5349 - protein, 15 aa, HIV-1
LVITTYWGLHTGERD

SEQ ID NO: 5350 - protein, 9 aa, HIV-1
VITTYWGLH

SEQ ID NO: 5351 - protein, 15 aa, HIV-1
LVITTYWGLHTGERD

SEQ ID NO: 5352 - protein, 9 aa, HIV-1
YWGLHTGER

SEQ ID NO: 5353 - protein, 15 aa, HIV-1
LVKHHMYVSGKARGW

SEQ ID NO: 5354 - protein, 9 aa, HIV-1
VKHHMYVSG

SEQ ID NO: 5355 - protein, 15 aa, HIV-1
MENRWQVMIVWQVDR

SEQ ID NO: 5356 - protein, 9 aa, HIV-1
WQVMIVWQV

SEQ ID NO: 5357 - protein, 15 aa, HIV-1
MIVWQVDRMRIRTWK

SEQ ID NO: 5358 - protein, 9 aa, HIV-1
IVWQVDRMR

SEQ ID NO: 5359 - protein, 15 aa, HIV-1
MIVWQVDRMRIRTWK

SEQ ID NO: 5360 - protein, 9 aa, HIV-1
MIVWQVDRM

SEQ ID NO: 5361 - protein, 15 aa, HIV-1
MIVWQVDRMRIRTWK

SEQ ID NO: 5362 - protein, 9 aa, HIV-1
WQVDRMRIR

SEQ ID NO: 5363 - protein, 15 aa, HIV-1
MRIRTWKSLVKHHMY

SEQ ID NO: 5364 - protein, 9 aa, HIV-1
IRTWKSLVK

SEQ ID NO: 5365 - protein, 15 aa, HIV-1
MRIRTWKSLVKHHMY

SEQ ID NO: 5366 - protein, 9 aa, HIV-1
WKSLVKHHM

SEQ ID NO: 5367 - protein, 15 aa, HIV-1
MYVSGKARGWFYRHH

SEQ ID NO: 5368 - protein, 9 aa, HIV-1
GKARGWFYR

SEQ ID NO: 5369 - protein, 15 aa, HIV-1
MYVSGKARGWFYRHH

SEQ ID NO: 5370 - protein, 9 aa, HIV-1
YVSGKARGW

SEQ ID NO: 5371 - protein, 15 aa, HIV-1
NKVGSLQYLALAALI

SEQ ID NO: 5372 - protein, 9 aa, HIV-1
LQYLALAAL

SEQ ID NO: 5373 - protein, 15 aa, HIV-1
NRWQVMIVWQVDRMR

SEQ ID NO: 5374 - protein, 9 aa, HIV-1
MIVWQVDRM

SEQ ID NO: 5375 - protein, 15 aa, HIV-1
NRWQVMIVWQVDRMR

SEQ ID NO: 5376 - protein, 9 aa, HIV-1
WQVMIVWQV

SEQ ID NO: 5377 - protein, 15 aa, HIV-1
PKKIKPPLPSVTKLT

SEQ ID NO: 5378 - protein, 9 aa, HIV-1
IKPPLPSVT

SEQ ID NO: 5379 - protein, 15 aa, HIV-1
PLGDARLVITTYWGL

SEQ ID NO: 5380 - protein, 9 aa, HIV-1
ARLVITTYW

SEQ ID NO: 5381 - protein, 15 aa, HIV-1
PLGDARLVITTYWGL

SEQ ID NO: 5382 - protein, 9 aa, HIV-1
LGDARLVIT

SEQ ID NO: 5383 - protein, 15 aa, HIV-1
PRCEYQAGHNKVGSL

SEQ ID NO: 5384 - protein, 9 aa, HIV-1
YQAGHNKVG

SEQ ID NO: 5385 - protein, 15 aa, HIV-1
QAGHNKVGSLQYLAL

SEQ ID NO: 5386 - protein, 9 aa, HIV-1
NKVGSLQYL

SEQ ID NO: 5387 - protein, 15 aa, HIV-1
QGVSIEWRKKRYSTQ

SEQ ID NO: 5388 - protein, 9 aa, HIV-1
IEWRKKRYS

SEQ ID NO: 5389 - protein, 15 aa, HIV-1
QGVSIEWRKKRYSTQ

SEQ ID NO: 5390 - protein, 9 aa, HIV-1
SIEWRKKRY

SEQ ID NO: 5391 - protein, 15 aa, HIV-1
QGVSIEWRKKRYSTQ

SEQ ID NO: 5392 - protein, 9 aa, HIV-1
VSIEWRKKR

SEQ ID NO: 5393 - protein, 15 aa, HIV-1
QLIHLYYFDCFSDSA

SEQ ID NO: 5394 - protein, 9 aa, HIV-1
IHLYYFDCF

SEQ ID NO: 5395 - protein, 15 aa, HIV-1
QVDRMRIRTWKSLVK

SEQ ID NO: 5396 - protein, 9 aa, HIV-1
DRMRIRTWK

SEQ ID NO: 5397 - protein, 15 aa, HIV-1
QVDRMRIRTWKSLVK

SEQ ID NO: 5398 - protein, 9 aa, HIV-1
MRIRTWKSL

SEQ ID NO: 5399 - protein, 15 aa, HIV-1
QVDRMRIRTWKSLVK

SEQ ID NO: 5400 - protein, 9 aa, HIV-1
RMRIRTWKS

SEQ ID NO: 5401 - protein, 15 aa, HIV-1
QVMIVWQVDRMRIRT

SEQ ID NO: 5402 - protein, 9 aa, HIV-1
IVWQVDRMR

SEQ ID NO: 5403 - protein, 15 aa, HIV-1
QVMIVWQVDRMRIRT

SEQ ID NO: 5404 - protein, 9 aa, HIV-1
MIVWQVDRM

SEQ ID NO: 5405 - protein, 15 aa, HIV-1
QYLALAALITPKKIK

SEQ ID NO: 5406 - protein, 9 aa, HIV-1
LALAALITP

SEQ ID NO: 5407 - protein, 15 aa, HIV-1
QYLALAALITPKKIK

SEQ ID NO: 5408 - protein, 9 aa, HIV-1
LAALITPKK

SEQ ID NO: 5409 - protein, 15 aa, HIV-1
QYLALAALITPKKIK

SEQ ID NO: 5410 - protein, 9 aa, HIV-1
YLALAALIT

SEQ ID NO: 5411 - protein, 15 aa, HIV-1
RCEYQAGHNKVGSLQ

SEQ ID NO: 5412 - protein, 9 aa, HIV-1
YQAGHNKVG

SEQ ID NO: 5413 - protein, 15 aa, HIV-1
RDWHLGQGVSIEWRK

SEQ ID NO: 5414 - protein, 9 aa, HIV-1
WHLGQGVSI

SEQ ID NO: 5415 - protein, 15 aa, HIV-1
RHHYESPHPRISSEV

SEQ ID NO: 5416 - protein, 9 aa, HIV-1
YESPHPRIS

SEQ ID NO: 5417 - protein, 15 aa, HIV-1
RIRTWKSLVKHHMYV

SEQ ID NO: 5418 - protein, 9 aa, HIV-1
IRTWKSLVK

SEQ ID NO: 5419 - protein, 15 aa, HIV-1
RIRTWKSLVKHHMYV

SEQ ID NO: 5420 - protein, 9 aa, HIV-1
WKSLVKHHM

SEQ ID NO: 5421 - protein, 15 aa, HIV-1
RKALLGHIVSPRCEY

SEQ ID NO: 5422 - protein, 9 aa, HIV-1
LGHIVSPRC

SEQ ID NO: 5423 - protein, 15 aa, HIV-1
RKALLGHIVSPRCEY

SEQ ID NO: 5424 - protein, 9 aa, HIV-1
LLGHIVSPR

SEQ ID NO: 5425 - protein, 15 aa, HIV-1
RKKRYSTQVDPELAD

SEQ ID NO: 5426 - protein, 9 aa, HIV-1
KKRYSTQVD

SEQ ID NO: 5427 - protein, 15 aa, HIV-1
RLVITTYWGLHTGER

SEQ ID NO: 5428 - protein, 9 aa, HIV-1
ITTYWGLHT

SEQ ID NO: 5429 - protein, 15 aa, HIV-1
RLVITTYWGLHTGER

SEQ ID NO: 5430 - protein, 9 aa, HIV-1
VITTYWGLH

SEQ ID NO: 5431 - protein, 15 aa, HIV-1
RMRIRTWKSLVKHHM

SEQ ID NO: 5432 - protein, 9 aa, HIV-1
IRTWKSLVK

SEQ ID NO: 5433 - protein, 15 aa, HIV-1
RMRIRTWKSLVKHHM

SEQ ID NO: 5434 - protein, 9 aa, HIV-1
RTWKSLVKH

SEQ ID NO: 5435 - protein, 15 aa, HIV-1
RTWKSLVKHHMYVSG

SEQ ID NO: 5436 - protein, 9 aa, HIV-1
WKSLVKHHM

SEQ ID NO: 5437 - protein, 15 aa, HIV-1
RWQVMIVWQVDRMRI

SEQ ID NO: 5438 - protein, 9 aa, HIV-1
MIVWQVDRM

SEQ ID NO: 5439 - protein, 15 aa, HIV-1
RWQVMIVWQVDRMRI

SEQ ID NO: 5440 - protein, 9 aa, HIV-1
WQVMIVWQV

SEQ ID NO: 5441 - protein, 15 aa, HIV-1
SAIRKALLGHIVSPR

SEQ ID NO: 5442 - protein, 9 aa, HIV-1
AIRKALLGH

SEQ ID NO: 5443 - protein, 15 aa, HIV-1
SAIRKALLGHIVSPR

SEQ ID NO: 5444 - protein, 9 aa, HIV-1
RKALLGHIV

SEQ ID NO: 5445 - protein, 15 aa, HIV-1
SDSAIRKALLGHIVS

SEQ ID NO: 5446 - protein, 9 aa, HIV-1
AIRKALLGH

SEQ ID NO: 5447 - protein, 15 aa, HIV-1
SDSAIRKALLGHIVS

SEQ ID NO: 5448 - protein, 9 aa, HIV-1
IRKALLGHI

SEQ ID NO: 5449 - protein, 15 aa, HIV-1
SEVHIPLGDARLVIT

SEQ ID NO: 5450 - protein, 9 aa, HIV-1
IPLGDARLV

SEQ ID NO: 5451 - protein, 15 aa, HIV-1
SIEWRKKRYSTQVDP

SEQ ID NO: 5452 - protein, 9 aa, HIV-1
WRKKRYSTQ

SEQ ID NO: 5453 - protein, 15 aa, HIV-1
SLQYLALAALITPKK

SEQ ID NO: 5454 - protein, 9 aa, HIV-1
ALAALITPK

SEQ ID NO: 5455 - protein, 15 aa, HIV-1
SLQYLALAALITPKK

SEQ ID NO: 5456 - protein, 9 aa, HIV-1
LALAALITP

SEQ ID NO: 5457 - protein, 15 aa, HIV-1
SLQYLALAALITPKK

SEQ ID NO: 5458 - protein, 9 aa, HIV-1
YLALAALIT

SEQ ID NO: 5459 - protein, 15 aa, HIV-1
SLVKHHMYVSGKARG

SEQ ID NO: 5460 - protein, 9 aa, HIV-1
VKHHMYVSG

SEQ ID NO: 5461 - protein, 15 aa, HIV-1
SPRCEYQAGHNKVGS

SEQ ID NO: 5462 - protein, 9 aa, HIV-1
YQAGHNKVG

SEQ ID NO: 5463 - protein, 15 aa, HIV-1
SSEVHIPLGDARLVI

SEQ ID NO: 5464 - protein, 9 aa, HIV-1
IPLGDARLV

SEQ ID NO: 5465 - protein, 15 aa, HIV-1
TGERDWHLGQGVSIE

SEQ ID NO: 5466 - protein, 9 aa, HIV-1
WHLGQGVSI

SEQ ID NO: 5467 - protein, 15 aa, HIV-1
TPKKIKPPLPSVTKL

SEQ ID NO: 5468 - protein, 9 aa, HIV-1
IKPPLPSVT

SEQ ID NO: 5469 - protein, 15 aa, HIV-1
TWKSLVKHHMYVSGK

SEQ ID NO: 5470 - protein, 9 aa, HIV-1
VKHHMYVSG

SEQ ID NO: 5471 - protein, 15 aa, HIV-1
TWKSLVKHHMYVSGK

SEQ ID NO: 5472 - protein, 9 aa, HIV-1
WKSLVKHHM

SEQ ID NO: 5473 - protein, 15 aa, HIV-1
VDRMRIRTWKSLVKH

SEQ ID NO: 5474 - protein, 9 aa, HIV-1
IRTWKSLVK

SEQ ID NO: 5475 - protein, 15 aa, HIV-1
VGSLQYLALAALITP

SEQ ID NO: 5476 - protein, 9 aa, HIV-1
LQYLALAAL

SEQ ID NO: 5477 - protein, 15 aa, HIV-1
VGSLQYLALAALITP

SEQ ID NO: 5478 - protein, 9 aa, HIV-1
YLALAALIT

SEQ ID NO: 5479 - protein, 15 aa, HIV-1
VHIPLGDARLVITTY

SEQ ID NO: 5480 - protein, 9 aa, HIV-1
IPLGDARLV

SEQ ID NO: 5481 - protein, 15 aa, HIV-1
VITTYWGLHTGERDW

SEQ ID NO: 5482 - protein, 9 aa, HIV-1
VITTYWGLH

SEQ ID NO: 5483 - protein, 15 aa, HIV-1
VITTYWGLHTGERDW

SEQ ID NO: 5484 - protein, 9 aa, HIV-1
YWGLHTGER

SEQ ID NO: 5485 - protein, 15 aa, HIV-1
VKHHMYVSGKARGWF

SEQ ID NO: 5486 - protein, 9 aa, HIV-1
YVSGKARGW

SEQ ID NO: 5487 - protein, 15 aa, HIV-1
VMIVWQVDRMRIRTW

SEQ ID NO: 5488 - protein, 9 aa, HIV-1
IVWQVDRMR

SEQ ID NO: 5489 - protein, 15 aa, HIV-1
VMIVWQVDRMRIRTW

SEQ ID NO: 5490 - protein, 9 aa, HIV-1
MIVWQVDRM

SEQ ID NO: 5491 - protein, 15 aa, HIV-1
VMIVWQVDRMRIRTW

SEQ ID NO: 5492 - protein, 9 aa, HIV-1
WQVDRMRIR

SEQ ID NO: 5493 - protein, 15 aa, HIV-1
VSGKARGWFYRHHYE

SEQ ID NO: 5494 - protein, 9 aa, HIV-1
ARGWFYRHH

SEQ ID NO: 5495 - protein, 15 aa, HIV-1
VSIEWRKKRYSTQVD

SEQ ID NO: 5496 - protein, 9 aa, HIV-1
IEWRKKRYS

SEQ ID NO: 5497 - protein, 15 aa, HIV-1
VSIEWRKKRYSTQVD

SEQ ID NO: 5498 - protein, 9 aa, HIV-1
VSIEWRKKR

SEQ ID NO: 5499 - protein, 15 aa, HIV-1
VSIEWRKKRYSTQVD

SEQ ID NO: 5500 - protein, 9 aa, HIV-1
WRKKRYSTQ

SEQ ID NO: 5501 - protein, 15 aa, HIV-1
VSPRCEYQAGHNKVG

SEQ ID NO: 5502 - protein, 9 aa, HIV-1
EYQAGHNKV

SEQ ID NO: 5503 - protein, 15 aa, HIV-1
VWQVDRMRIRTWKSL

SEQ ID NO: 5504 - protein, 9 aa, HIV-1
RMRIRTWKS

SEQ ID NO: 5505 - protein, 15 aa, HIV-1
VWQVDRMRIRTWKSL

SEQ ID NO: 5506 - protein, 9 aa, HIV-1
VDRMRIRTW

SEQ ID NO: 5507 - protein, 15 aa, HIV-1
WFYRHHYESPHPRIS

SEQ ID NO: 5508 - protein, 9 aa, HIV-1
YRHHYESPH

SEQ ID NO: 5509 - protein, 15 aa, HIV-1
WHLGQGVSIEWRKKR

SEQ ID NO: 5510 - protein, 9 aa, HIV-1
GQGVSIEWR

SEQ ID NO: 5511 - protein, 15 aa, HIV-1
WHLGQGVSIEWRKKR

SEQ ID NO: 5512 - protein, 9 aa, HIV-1
LGQGVSIEW

SEQ ID NO: 5513 - protein, 15 aa, HIV-1
WKSLVKHHMYVSGKA

SEQ ID NO: 5514 - protein, 9 aa, HIV-1
VKHHMYVSG

SEQ ID NO: 5515 - protein, 15 aa, HIV-1
WKSLVKHHMYVSGKA

SEQ ID NO: 5516 - protein, 9 aa, HIV-1
WKSLVKHHM

SEQ ID NO: 5517 - protein, 15 aa, HIV-1
WQVDRMRIRTWKSLV

SEQ ID NO: 5518 - protein, 9 aa, HIV-1
MRIRTWKSL

SEQ ID NO: 5519 - protein, 15 aa, HIV-1
WQVDRMRIRTWKSLV

SEQ ID NO: 5520 - protein, 9 aa, HIV-1
RMRIRTWKS

SEQ ID NO: 5521 - protein, 15 aa, HIV-1
WQVMIVWQVDRMRIR

SEQ ID NO: 5522 - protein, 9 aa, HIV-1
MIVWQVDRM

SEQ ID NO: 5523 - protein, 15 aa, HIV-1
WQVMIVWQVDRMRIR

SEQ ID NO: 5524 - protein, 9 aa, HIV-1
VMIVWQVDR

SEQ ID NO: 5525 - protein, 15 aa, HIV-1
WQVMIVWQVDRMRIR

SEQ ID NO: 5526 - protein, 9 aa, HIV-1
WQVMIVWQV

SEQ ID NO: 5527 - protein, 15 aa, HIV-1
YLALAALITPKKIKP

SEQ ID NO: 5528 - protein, 9 aa, HIV-1
LAALITPKK

SEQ ID NO: 5529 - protein, 15 aa, HIV-1
YLALAALITPKKIKP

SEQ ID NO: 5530 - protein, 9 aa, HIV-1
YLALAALIT

SEQ ID NO: 5531 - protein, 15 aa, HIV-1
YQAGHNKVGSLQYLA

SEQ ID NO: 5532 - protein, 9 aa, HIV-1
YQAGHNKVG

SEQ ID NO: 5533 - protein, 15 aa, HIV-1
YRHHYESPHPRISSE

SEQ ID NO: 5534 - protein, 9 aa, HIV-1
YESPHPRIS

SEQ ID NO: 5535 - protein, 15 aa, HIV-1
YVSGKARGWFYRHHY

SEQ ID NO: 5536 - protein, 9 aa, HIV-1
ARGWFYRHH

SEQ ID NO: 5537 - protein, 15 aa, HIV-1
YVSGKARGWFYRHHY

SEQ ID NO: 5538 - protein, 9 aa, HIV-1
YVSGKARGW

SEQ ID NO: 5539 - protein, 8 aa, HIV-1
EPHNEWTL

SEQ ID NO: 5540 - protein, 8 aa, HIV-1
HNEWTLEL

SEQ ID NO: 5541 - protein, 8 aa, HIV-1
NEWTLELL

SEQ ID NO: 5542 - protein, 8 aa, HIV-1
TLELLEEL

SEQ ID NO: 5543 - protein, 8 aa, HIV-1
EELKNEAV

SEQ ID NO: 5544 - protein, 8 aa, HIV-1
ELKNEAVR

SEQ ID NO: 5545 - protein, 8 aa, HIV-1
EAVRHFPR

SEQ ID NO: 5546 - protein, 8 aa, HIV-1
AVRHFPRI

SEQ ID NO: 5547 - protein, 8 aa, HIV-1
GQHIYETY

SEQ ID NO: 5548 - protein, 8 aa, HIV-1
ETYGDTWA

SEQ ID NO: 5549 - protein, 8 aa, HIV-1
YGDTWAGV

SEQ ID NO: 5550 - protein, 8 aa, HIV-1
DTWAGVEA

SEQ ID NO: 5551 - protein, 8 aa, HIV-1
TWAGVEAI

SEQ ID NO: 5552 - protein, 8 aa, HIV-1
VEAIIRIL

SEQ ID NO: 5553 - protein, 8 aa, HIV-1
RILQQLLF

SEQ ID NO: 5554 - protein, 8 aa, HIV-1
ILQQLLFI

SEQ ID NO: 5555 - protein, 8 aa, HIV-1
QQLLFIHF

SEQ ID NO: 5556 - protein, 8 aa, HIV-1
QLLFIHFR

SEQ ID NO: 5557 - protein, 8 aa, HIV-1
LLFIHFRI

SEQ ID NO: 5558 - protein, 8 aa, HIV-1
RIGCRHSR

SEQ ID NO: 5559 - protein, 8 aa, HIV-1
HSRIGVTR

SEQ ID NO: 5560 - protein, 8 aa, HIV-1
RIGVTRQR

SEQ ID NO: 5561 - protein, 8 aa, HIV-1
VTRQRRAR

SEQ ID NO: 5562 - protein, 8 aa, HIV-1
RARNGASR

SEQ ID NO: 5563 - protein, 9 aa, HIV-1
REPHNEWTL

SEQ ID NO: 5564 - protein, 9 aa, HIV-1
PHNEWTLEL

SEQ ID NO: 5565 - protein, 9 aa, HIV-1
WTLELLEEL

SEQ ID NO: 5566 - protein, 9 aa, HIV-1
TLELLEELK

SEQ ID NO: 5567 - protein, 9 aa, HIV-1
LLEELKNEA

SEQ ID NO: 5568 - protein, 9 aa, HIV-1
NEAVRHFPR

SEQ ID NO: 5569 - protein, 9 aa, HIV-1
EAVRHFPRI

SEQ ID NO: 5570 - protein, 9 aa, HIV-1
FPRIWLHGL

SEQ ID NO: 5571 - protein, 9 aa, HIV-1
WLHGLGQHI

SEQ ID NO: 5572 - protein, 9 aa, HIV-1
GLGQHIYET

SEQ ID NO: 5573 - protein, 9 aa, HIV-1
IYETYGDTW

SEQ ID NO: 5574 - protein, 9 aa, HIV-1
YETYGDTWA

SEQ ID NO: 5575 - protein, 9 aa, HIV-1
ETYGDTWAG

SEQ ID NO: 5576 - protein, 9 aa, HIV-1
TYGDTWAGV

SEQ ID NO: 5577 - protein, 9 aa, HIV-1
DTWAGVEAI

SEQ ID NO: 5578 - protein, 9 aa, HIV-1
TWAGVEAII

SEQ ID NO: 5579 - protein, 9 aa, HIV-1
AIIRILQQL

SEQ ID NO: 5580 - protein, 9 aa, HIV-1
IRILQQLLF

SEQ ID NO: 5581 - protein, 9 aa, HIV-1
RILQQLLFI

SEQ ID NO: 5582 - protein, 9 aa, HIV-1
LQQLLFIHF

SEQ ID NO: 5583 - protein, 9 aa, HIV-1
QQLLFIHFR

SEQ ID NO: 5584 - protein, 9 aa, HIV-1
QLLFIHFRI

SEQ ID NO: 5585 - protein, 9 aa, HIV-1
FIHFRIGCR

SEQ ID NO: 5586 - protein, 9 aa, HIV-1
FRIGCRHSR

SEQ ID NO: 5587 - protein, 9 aa, HIV-1
RIGCRHSRI

SEQ ID NO: 5588 - protein, 9 aa, HIV-1
RHSRIGVTR

SEQ ID NO: 5589 - protein, 9 aa, HIV-1
SRIGVTRQR

SEQ ID NO: 5590 - protein, 9 aa, HIV-1
RIGVTRQRR

SEQ ID NO: 5591 - protein, 9 aa, HIV-1
GVTRQRRAR

SEQ ID NO: 5592 - protein, 9 aa, HIV-1
RQRRARNGA

SEQ ID NO: 5593 - protein, 9 aa, HIV-1
RRARNGASR

SEQ ID NO: 5594 - protein, 10 aa, HIV-1
QAPEDQGPQR

SEQ ID NO: 5595 - protein, 10 aa, HIV-1
EPHNEWTLEL

SEQ ID NO: 5596 - protein, 10 aa, HIV-1
WTLELLEELK

SEQ ID NO: 5597 - protein, 10 aa, HIV-1
ELLEELKNEA

SEQ ID NO: 5598 - protein, 10 aa, HIV-1
LLEELKNEAV

SEQ ID NO: 5599 - protein, 10 aa, HIV-1
ELKNEAVRHF

SEQ ID NO: 5600 - protein, 10 aa, HIV-1
KNEAVRHFPR

SEQ ID NO: 5601 - protein, 10 aa, HIV-1
EAVRHFPRIW

SEQ ID NO: 5602 - protein, 10 aa, HIV-1
AVRHFPRIWL

SEQ ID NO: 5603 - protein, 10 aa, HIV-1
HFPRIWLHGL

SEQ ID NO: 5604 - protein, 10 aa, HIV-1
FPRIWLHGLG

SEQ ID NO: 5605 - protein, 10 aa, HIV-1
IWLHGLGQHI

SEQ ID NO: 5606 - protein, 10 aa, HIV-1
WLHGLGQHIY

SEQ ID NO: 5607 - protein, 10 aa, HIV-1
GLGQHIYETY

SEQ ID NO: 5608 - protein, 10 aa, HIV-1
HIYETYGDTW

SEQ ID NO: 5609 - protein, 10 aa, HIV-1
ETYGDTWAGV

SEQ ID NO: 5610 - protein, 10 aa, HIV-1
DTWAGVEAII

SEQ ID NO: 5611 - protein, 10 aa, HIV-1
TWAGVEAIIR

SEQ ID NO: 5612 - protein, 10 aa, HIV-1
EAIIRILQQL

SEQ ID NO: 5613 - protein, 10 aa, HIV-1
AIIRILQQLL

SEQ ID NO: 5614 - protein, 10 aa, HIV-1
ILQQLLFIHF

SEQ ID NO: 5615 - protein, 10 aa, HIV-1
LQQLLFIHFR

SEQ ID NO: 5616 - protein, 10 aa, HIV-1
QQLLFIHFRI

SEQ ID NO: 5617 - protein, 10 aa, HIV-1
LLFIHFRIGC

SEQ ID NO: 5618 - protein, 10 aa, HIV-1
LFIHFRIGCR

SEQ ID NO: 5619 - protein, 10 aa, HIV-1
HFRIGCRHSR

SEQ ID NO: 5620 - protein, 10 aa, HIV-1
FRIGCRHSRI

SEQ ID NO: 5621 - protein, 10 aa, HIV-1
CRHSRIGVTR

SEQ ID NO: 5622 - protein, 10 aa, HIV-1
HSRIGVTRQR

SEQ ID NO: 5623 - protein, 10 aa, HIV-1
SRIGVTRQRR

SEQ ID NO: 5624 - protein, 10 aa, HIV-1
QRRARNGASR

SEQ ID NO: 5625 - protein, 11 aa, HIV-1
EQAPEDQGPQR

SEQ ID NO: 5626 - protein, 11 aa, HIV-1
REPHNEWTLEL

SEQ ID NO: 5627 - protein, 11 aa, HIV-1
EPHNEWTLELL

SEQ ID NO: 5628 - protein, 11 aa, HIV-1
NEWTLELLEEL

SEQ ID NO: 5629 - protein, 11 aa, HIV-1
ELLEELKNEAV

SEQ ID NO: 5630 - protein, 11 aa, HIV-1
EELKNEAVRHF

SEQ ID NO: 5631 - protein, 11 aa, HIV-1
EAVRHFPRIWL

SEQ ID NO: 5632 - protein, 11 aa, HIV-1
RHFPRIWLHGL

SEQ ID NO: 5633 - protein, 11 aa, HIV-1
RIWLHGLGQHI

SEQ ID NO: 5634 - protein, 11 aa, HIV-1
IWLHGLGQHIY

SEQ ID NO: 5635 - protein, 11 aa, HIV-1
WLHGLGQHIYE

SEQ ID NO: 5636 - protein, 11 aa, HIV-1
HIYETYGDTWA

SEQ ID NO: 5637 - protein, 11 aa, HIV-1
YETYGDTWAGV

SEQ ID NO: 5638 - protein, 11 aa, HIV-1
ETYGDTWAGVE

SEQ ID NO: 5639 - protein, 11 aa, HIV-1
DTWAGVEAIIR

SEQ ID NO: 5640 - protein, 11 aa, HIV-1
TWAGVEAIIRI

SEQ ID NO: 5641 - protein, 11 aa, HIV-1
VEAIIRILQQL

SEQ ID NO: 5642 - protein, 11 aa, HIV-1
EAIIRILQQLL

SEQ ID NO: 5643 - protein, 11 aa, HIV-1
AIIRILQQLLF

SEQ ID NO: 5644 - protein, 11 aa, HIV-1
IIRILQQLLFI

SEQ ID NO: 5645 - protein, 11 aa, HIV-1
RILQQLLFIHF

SEQ ID NO: 5646 - protein, 11 aa, HIV-1
ILQQLLFIHFR

SEQ ID NO: 5647 - protein, 11 aa, HIV-1
LQQLLFIHFRI

SEQ ID NO: 5648 - protein, 11 aa, HIV-1
QLLFIHFRIGC

SEQ ID NO: 5649 - protein, 11 aa, HIV-1
LLFIHFRIGCR

SEQ ID NO: 5650 - protein, 11 aa, HIV-1
IHFRIGCRHSR

SEQ ID NO: 5651 - protein, 11 aa, HIV-1
RIGCRHSRIGV

SEQ ID NO: 5652 - protein, 11 aa, HIV-1
GCRHSRIGVTR

SEQ ID NO: 5653 - protein, 11 aa, HIV-1
HSRIGVTRQRR

SEQ ID NO: 5654 - protein, 11 aa, HIV-1
RIGVTRQRRAR

SEQ ID NO: 5655 - protein, 11 aa, HIV-1
RQRRARNGASR

SEQ ID NO: 5656 - protein, 15 aa, HIV-1
AGVEAIIRILQQLLF

SEQ ID NO: 5657 - protein, 9 aa, HIV-1
VEAIIRILQ

SEQ ID NO: 5658 - protein, 15 aa, HIV-1
AIIRILQQLLFIHFR

SEQ ID NO: 5659 - protein, 9 aa, HIV-1
ILQQLLFIH

SEQ ID NO: 5660 - protein, 15 aa, HIV-1
AIIRILQQLLFIHFR

SEQ ID NO: 5661 - protein, 9 aa, HIV-1
IRILQQLLF

SEQ ID NO: 5662 - protein, 15 aa, HIV-1
AIIRILQQLLFIHFR

SEQ ID NO: 5663 - protein, 9 aa, HIV-1
LQQLLFIHF

SEQ ID NO: 5664 - protein, 15 aa, HIV-1
DTWAGVEAIIRILQQ

SEQ ID NO: 5665 - protein, 9 aa, HIV-1
WAGVEAIIR

SEQ ID NO: 5666 - protein, 15 aa, HIV-1
EAIIRILQQLLFIHF

SEQ ID NO: 5667 - protein, 9 aa, HIV-1
IIRILQQLL

SEQ ID NO: 5668 - protein, 15 aa, HIV-1
EAIIRILQQLLFIHF

SEQ ID NO: 5669 - protein, 9 aa, HIV-1
ILQQLLFIH

SEQ ID NO: 5670 - protein, 15 aa, HIV-1
EAIIRILQQLLFIHF

SEQ ID NO: 5671 - protein, 9 aa, HIV-1
IRILQQLLF

SEQ ID NO: 5672 - protein, 15 aa, HIV-1
EAVRHFPRIWLHGLG

SEQ ID NO: 5673 - protein, 9 aa, HIV-1
VRHFPRIWL

SEQ ID NO: 5674 - protein, 15 aa, HIV-1
EELKNEAVRHFPRIW

SEQ ID NO: 5675 - protein, 9 aa, HIV-1
LKNEAVRHF

SEQ ID NO: 5676 - protein, 15 aa, HIV-1
ELKNEAVRHFPRIWL

SEQ ID NO: 5677 - protein, 9 aa, HIV-1
LKNEAVRHF

SEQ ID NO: 5678 - protein, 15 aa, HIV-1
ELKNEAVRHFPRIWL

SEQ ID NO: 5679 - protein, 9 aa, HIV-1
NEAVRHFPR

SEQ ID NO: 5680 - protein, 15 aa, HIV-1
ELLEELKNEAVRHFP

SEQ ID NO: 5681 - protein, 9 aa, HIV-1
LKNEAVRHF

SEQ ID NO: 5682 - protein, 15 aa, HIV-1
ETYGDTWAGVEAIIR

SEQ ID NO: 5683 - protein, 9 aa, HIV-1
DTWAGVEAI

SEQ ID NO: 5684 - protein, 15 aa, HIV-1
FIHFRIGCRHSRIGV

SEQ ID NO: 5685 - protein, 9 aa, HIV-1
FIHFRIGCR

SEQ ID NO: 5686 - protein, 15 aa, HIV-1
FPRIWLHGLGQHIYE

SEQ ID NO: 5687 - protein, 9 aa, HIV-1
IWLHGLGQH

SEQ ID NO: 5688 - protein, 15 aa, HIV-1
FPRIWLHGLGQHIYE

SEQ ID NO: 5689 - protein, 9 aa, HIV-1
WLHGLGQHI

SEQ ID NO: 5690 - protein, 15 aa, HIV-1
GDTWAGVEAIIRILQ

SEQ ID NO: 5691 - protein, 9 aa, HIV-1
WAGVEAIIR

SEQ ID NO: 5692 - protein, 15 aa, HIV-1
GVEAIIRILQQLLFI

SEQ ID NO: 5693 - protein, 9 aa, HIV-1
IRILQQLLF

SEQ ID NO: 5694 - protein, 15 aa, HIV-1
HFPRIWLHGLGQHIY

SEQ ID NO: 5695 - protein, 9 aa, HIV-1
IWLHGLGQH

SEQ ID NO: 5696 - protein, 15 aa, HIV-1
HFPRIWLHGLGQHIY

SEQ ID NO: 5697 - protein, 9 aa, HIV-1
WLHGLGQHI

SEQ ID NO: 5698 - protein, 15 aa, HIV-1
IIRILQQLLFIHFRI

SEQ ID NO: 5699 - protein, 9 aa, HIV-1
ILQQLLFIH

SEQ ID NO: 5700 - protein, 15 aa, HIV-1
IIRILQQLLFIHFRI

SEQ ID NO: 5701 - protein, 9 aa, HIV-1
IRILQQLLF

SEQ ID NO: 5702 - protein, 15 aa, HIV-1
IIRILQQLLFIHFRI

SEQ ID NO: 5703 - protein, 9 aa, HIV-1
LQQLLFIHF

SEQ ID NO: 5704 - protein, 15 aa, HIV-1
ILQQLLFIHFRIGCR

SEQ ID NO: 5705 - protein, 9 aa, HIV-1
ILQQLLFIH

SEQ ID NO: 5706 - protein, 15 aa, HIV-1
ILQQLLFIHFRIGCR

SEQ ID NO: 5707 - protein, 9 aa, HIV-1
LLFIHFRIG

SEQ ID NO: 5708 - protein, 15 aa, HIV-1
IRILQQLLFIHFRIG

SEQ ID NO: 5709 - protein, 9 aa, HIV-1
ILQQLLFIH

SEQ ID NO: 5710 - protein, 15 aa, HIV-1
IRILQQLLFIHFRIG

SEQ ID NO: 5711 - protein, 9 aa, HIV-1
IRILQQLLF

SEQ ID NO: 5712 - protein, 15 aa, HIV-1
KNEAVRHFPRIWLHG

SEQ ID NO: 5713 - protein, 9 aa, HIV-1
VRHFPRIWL

SEQ ID NO: 5714 - protein, 15 aa, HIV-1
LEELKNEAVRHFPRI

SEQ ID NO: 5715 - protein, 9 aa, HIV-1
LKNEAVRHF

SEQ ID NO: 5716 - protein, 15 aa, HIV-1
LELLEELKNEAVRHF

SEQ ID NO: 5717 - protein, 9 aa, HIV-1
ELKNEAVRH

SEQ ID NO: 5718 - protein, 15 aa, HIV-1
LELLEELKNEAVRHF

SEQ ID NO: 5719 - protein, 9 aa, HIV-1
LEELKNEAV

SEQ ID NO: 5720 - protein, 15 aa, HIV-1
LFIHFRIGCRHSRIG

SEQ ID NO: 5721 - protein, 9 aa, HIV-1
FIHFRIGCR

SEQ ID NO: 5722 - protein, 15 aa, HIV-1
LKNEAVRHFPRIWLH

SEQ ID NO: 5723 - protein, 9 aa, HIV-1
LKNEAVRHF

SEQ ID NO: 5724 - protein, 15 aa, HIV-1
LKNEAVRHFPRIWLH

SEQ ID NO: 5725 - protein, 9 aa, HIV-1
VRHFPRIWL

SEQ ID NO: 5726 - protein, 15 aa, HIV-1
LLEELKNEAVRHFPR

SEQ ID NO: 5727 - protein, 9 aa, HIV-1
LKNEAVRHF

SEQ ID NO: 5728 - protein, 15 aa, HIV-1
LLFIHFRIGCRHSRI

SEQ ID NO: 5729 - protein, 9 aa, HIV-1
FIHFRIGCR

SEQ ID NO: 5730 - protein, 15 aa, HIV-1
LQQLLFIHFRIGCRH

SEQ ID NO: 5731 - protein, 9 aa, HIV-1
FIHFRIGCR

SEQ ID NO: 5732 - protein, 15 aa, HIV-1
NEAVRHFPRIWLHGL

SEQ ID NO: 5733 - protein, 9 aa, HIV-1
VRHFPRIWL

SEQ ID NO: 5734 - protein, 15 aa, HIV-1
PRIWLHGLGQHIYET

SEQ ID NO: 5735 - protein, 9 aa, HIV-1
WLHGLGQHI

SEQ ID NO: 5736 - protein, 15 aa, HIV-1
QLLFIHFRIGCRHSR

SEQ ID NO: 5737 - protein, 9 aa, HIV-1
FIHFRIGCR

SEQ ID NO: 5738 - protein, 15 aa, HIV-1
QQLLFIHFRIGCRHS

SEQ ID NO: 5739 - protein, 9 aa, HIV-1
FIHFRIGCR

SEQ ID NO: 5740 - protein, 15 aa, HIV-1
RHFPRIWLHGLGQHI

SEQ ID NO: 5741 - protein, 9 aa, HIV-1
FPRIWLHGL

SEQ ID NO: 5742 - protein, 15 aa, HIV-1
RHFPRIWLHGLGQHI

SEQ ID NO: 5743 - protein, 9 aa, HIV-1
IWLHGLGQH

SEQ ID NO: 5744 - protein, 15 aa, HIV-1
RILQQLLFIHFRIGC

SEQ ID NO: 5745 - protein, 9 aa, HIV-1
ILQQLLFIH

SEQ ID NO: 5746 - protein, 15 aa, HIV-1
RIWLHGLGQHIYETY

SEQ ID NO: 5747 - protein, 9 aa, HIV-1
WLHGLGQHI

SEQ ID NO: 5748 - protein, 15 aa, HIV-1
TYGDTWAGVEAIIRI

SEQ ID NO: 5749 - protein, 9 aa, HIV-1
WAGVEAIIR

SEQ ID NO: 5750 - protein, 15 aa, HIV-1
VEAIIRILQQLLFIH

SEQ ID NO: 5751 - protein, 9 aa, HIV-1
IRILQQLLF

SEQ ID NO: 5752 - protein, 15 aa, HIV-1
VRHFPRIWLHGLGQH

SEQ ID NO: 5753 - protein, 9 aa, HIV-1
FPRIWLHGL

SEQ ID NO: 5754 - protein, 15 aa, HIV-1
WAGVEAIIRILQQLL

SEQ ID NO: 5755 - protein, 9 aa, HIV-1
WAGVEAIIR

SEQ ID NO: 5756 - protein, 15 aa, HIV-1
YGDTWAGVEAIIRIL

SEQ ID NO: 5757 - protein, 9 aa, HIV-1
WAGVEAIIR

SEQ ID NO: 5758 - protein, 8 aa, HIV-1
MQPIPIVA

SEQ ID NO: 5759 - protein, 8 aa, HIV-1
QPIPIVAI

SEQ ID NO: 5760 - protein, 8 aa, HIV-1
PIPIVAIV

SEQ ID NO: 5761 - protein, 8 aa, HIV-1
IPIVAIVA

SEQ ID NO: 5762 - protein, 8 aa, HIV-1
PIVAIVAL

SEQ ID NO: 5763 - protein, 8 aa, HIV-1
IVAIVALV

SEQ ID NO: 5764 - protein, 8 aa, HIV-1
VAIVALVV

SEQ ID NO: 5765 - protein, 8 aa, HIV-1
AIVALVVA

SEQ ID NO: 5766 - protein, 8 aa, HIV-1
IVALVVAI

SEQ ID NO: 5767 - protein, 8 aa, HIV-1
ALVVAIII

SEQ ID NO: 5768 - protein, 8 aa, HIV-1
LVVAIIIA

SEQ ID NO: 5769 - protein, 8 aa, HIV-1
VVAIIIAI

SEQ ID NO: 5770 - protein, 8 aa, HIV-1
VAIIIAIV

SEQ ID NO: 5771 - protein, 8 aa, HIV-1
AIIIAIVV

SEQ ID NO: 5772 - protein, 8 aa, HIV-1
IIIAIVVW

SEQ ID NO: 5773 - protein, 8 aa, HIV-1
IAIVVWSI

SEQ ID NO: 5774 - protein, 8 aa, HIV-1
AIVVWSIV

SEQ ID NO: 5775 - protein, 8 aa, HIV-1
IVVWSIVI

SEQ ID NO: 5776 - protein, 8 aa, HIV-1
VVWSIVII

SEQ ID NO: 5777 - protein, 8 aa, HIV-1
WSIVIIEY

SEQ ID NO: 5778 - protein, 8 aa, HIV-1
SIVIIEYR

SEQ ID NO: 5779 - protein, 8 aa, HIV-1
IVIIEYRK

SEQ ID NO: 5780 - protein, 8 aa, HIV-1
VIIEYRKI

SEQ ID NO: 5781 - protein, 8 aa, HIV-1
IEYRKILR

SEQ ID NO: 5782 - protein, 8 aa, HIV-1
RKILRQRK

SEQ ID NO: 5783 - protein, 8 aa, HIV-1
SEGEISAL

SEQ ID NO: 5784 - protein, 8 aa, HIV-1
EISALVEM

SEQ ID NO: 5785 - protein, 8 aa, HIV-1
SALVEMGV

SEQ ID NO: 5786 - protein, 8 aa, HIV-1
LVEMGVEM

SEQ ID NO: 5787 - protein, 8 aa, HIV-1
APWDVDDL

SEQ ID NO: 5788 - protein, 9 aa, HIV-1
MQPIPIVAI

SEQ ID NO: 5789 - protein, 9 aa, HIV-1
QPIPIVAIV

SEQ ID NO: 5790 - protein, 9 aa, HIV-1
IPIVAIVAL

SEQ ID NO: 5791 - protein, 9 aa, HIV-1
PIVAIVALV

SEQ ID NO: 5792 - protein, 9 aa, HIV-1
IVAIVALVV

SEQ ID NO: 5793 - protein, 9 aa, HIV-1
AIVALVVAI

SEQ ID NO: 5794 - protein, 9 aa, HIV-1
IVALVVAII

SEQ ID NO: 5795 - protein, 9 aa, HIV-1
VALVVAIII

SEQ ID NO: 5796 - protein, 9 aa, HIV-1
ALVVAIIIA

SEQ ID NO: 5797 - protein, 9 aa, HIV-1
LVVAIIIAI

SEQ ID NO: 5798 - protein, 9 aa, HIV-1
VVAIIIAIV

SEQ ID NO: 5799 - protein, 9 aa, HIV-1
VAIIIAIVV

SEQ ID NO: 5800 - protein, 9 aa, HIV-1
AIIIAIVVW

SEQ ID NO: 5801 - protein, 9 aa, HIV-1
IIAIVVWSI

SEQ ID NO: 5802 - protein, 9 aa, HIV-1
IAIVVWSIV

SEQ ID NO: 5803 - protein, 9 aa, HIV-1
AIVVWSIVI

SEQ ID NO: 5804 - protein, 9 aa, HIV-1
IVVWSIVII

SEQ ID NO: 5805 - protein, 9 aa, HIV-1
VWSIVIIEY

SEQ ID NO: 5806 - protein, 9 aa, HIV-1
WSIVIIEYR

SEQ ID NO: 5807 - protein, 9 aa, HIV-1
SIVIIEYRK

SEQ ID NO: 5808 - protein, 9 aa, HIV-1
VIIEYRKIL

SEQ ID NO: 5809 - protein, 9 aa, HIV-1
IIEYRKILR

SEQ ID NO: 5810 - protein, 9 aa, HIV-1
EYRKILRQR

SEQ ID NO: 5811 - protein, 9 aa, HIV-1
YRKILRQRK

SEQ ID NO: 5812 - protein, 9 aa, HIV-1
ILRQRKIDR

SEQ ID NO: 5813 - protein, 9 aa, HIV-1
KIDRLIDRL

SEQ ID NO: 5814 - protein, 9 aa, HIV-1
RLIDRLIER

SEQ ID NO: 5815 - protein, 9 aa, HIV-1
LIDRLIERA

SEQ ID NO: 5816 - protein, 9 aa, HIV-1
ESEGEISAL

SEQ ID NO: 5817 - protein, 9 aa, HIV-1
SEGEISALV

SEQ ID NO: 5818 - protein, 9 aa, HIV-1
GEISALVEM

SEQ ID NO: 5819 - protein, 9 aa, HIV-1
ISALVEMGV

SEQ ID NO: 5820 - protein, 9 aa, HIV-1
ALVEMGVEM

SEQ ID NO: 5821 - protein, 9 aa, HIV-1
VEMGHHAPW

SEQ ID NO: 5822 - protein, 10 aa, HIV-1
MQPIPIVAIV

SEQ ID NO: 5823 - protein, 10 aa, HIV-1
QPIPIVAIVA

SEQ ID NO: 5824 - protein, 10 aa, HIV-1
IPIVAIVALV

SEQ ID NO: 5825 - protein, 10 aa, HIV-1
PIVAIVALVV

SEQ ID NO: 5826 - protein, 10 aa, HIV-1
VAIVALVVAI

SEQ ID NO: 5827 - protein, 10 aa, HIV-1
AIVALVVAII

SEQ ID NO: 5828 - protein, 10 aa, HIV-1
IVALVVAIII

SEQ ID NO: 5829 - protein, 10 aa, HIV-1
ALVVAIIIAI

SEQ ID NO: 5830 - protein, 10 aa, HIV-1
LVVAIIIAIV

SEQ ID NO: 5831 - protein, 10 aa, HIV-1
VVAIIIAIVV

SEQ ID NO: 5832 - protein, 10 aa, HIV-1
VAIIIAIVVW

SEQ ID NO: 5833 - protein, 10 aa, HIV-1
IIIAIVVWSI

SEQ ID NO: 5834 - protein, 10 aa, HIV-1
IIAIVVWSIV

SEQ ID NO: 5835 - protein, 10 aa, HIV-1
IAIVVWSIVI

SEQ ID NO: 5836 - protein, 10 aa, HIV-1
AIVVWSIVII

SEQ ID NO: 5837 - protein, 10 aa, HIV-1
VVWSIVIIEY

SEQ ID NO: 5838 - protein, 10 aa, HIV-1
VWSIVIIEYR

SEQ ID NO: 5839 - protein, 10 aa, HIV-1
WSIVIIEYRK

SEQ ID NO: 5840 - protein, 10 aa, HIV-1
VIIEYRKILR

SEQ ID NO: 5841 - protein, 10 aa, HIV-1
IEYRKILRQR

SEQ ID NO: 5842 - protein, 10 aa, HIV-1
EYRKILRQRK

SEQ ID NO: 5843 - protein, 10 aa, HIV-1
KILRQRKIDR

SEQ ID NO: 5844 - protein, 10 aa, HIV-1
ILRQRKIDRL

SEQ ID NO: 5845 - protein, 10 aa, HIV-1
KIDRLIDRLI

SEQ ID NO: 5846 - protein, 10 aa, HIV-1
RLIDRLIERA

SEQ ID NO: 5847 - protein, 10 aa, HIV-1
NESEGEISAL

SEQ ID NO: 5848 - protein, 10 aa, HIV-1
ESEGEISALV

SEQ ID NO: 5849 - protein, 10 aa, HIV-1
EISALVEMGV

SEQ ID NO: 5850 - protein, 10 aa, HIV-1
SALVEMGVEM

SEQ ID NO: 5851 - protein, 10 aa, HIV-1
EMGHHAPWDV

SEQ ID NO: 5852 - protein, 10 aa, HIV-1
HHAPWDVDDL

SEQ ID NO: 5853 - protein, 11 aa, HIV-1
MQPIPIVAIVA

SEQ ID NO: 5854 - protein, 11 aa, HIV-1
QPIPIVAIVAL

SEQ ID NO: 5855 - protein, 11 aa, HIV-1
PIPIVAIVALV

SEQ ID NO: 5856 - protein, 11 aa, HIV-1
IPIVAIVALVV

SEQ ID NO: 5857 - protein, 11 aa, HIV-1
IVAIVALVVAI

SEQ ID NO: 5858 - protein, 11 aa, HIV-1
VAIVALVVAII

SEQ ID NO: 5859 - protein, 11 aa, HIV-1
AIVALVVAIII

SEQ ID NO: 5860 - protein, 11 aa, HIV-1
IVALVVAIIIA

SEQ ID NO: 5861 - protein, 11 aa, HIV-1
ALVVAIIIAIV

SEQ ID NO: 5862 - protein, 11 aa, HIV-1
LVVAIIIAIVV

SEQ ID NO: 5863 - protein, 11 aa, HIV-1
VVAIIIAIVVW

SEQ ID NO: 5864 - protein, 11 aa, HIV-1
AIIIAIVVWSI

SEQ ID NO: 5865 - protein, 11 aa, HIV-1
IIIAIVVWSIV

SEQ ID NO: 5866 - protein, 11 aa, HIV-1
IIAIVVWSIVI

SEQ ID NO: 5867 - protein, 11 aa, HIV-1
IAIVVWSIVII

SEQ ID NO: 5868 - protein, 11 aa, HIV-1
IVVWSIVIIEY

SEQ ID NO: 5869 - protein, 11 aa, HIV-1
VVWSIVIIEYR

SEQ ID NO: 5870 - protein, 11 aa, HIV-1
VWSIVIIEYRK

SEQ ID NO: 5871 - protein, 11 aa, HIV-1
WSIVIIEYRKI

SEQ ID NO: 5872 - protein, 11 aa, HIV-1
SIVIIEYRKIL

SEQ ID NO: 5873 - protein, 11 aa, HIV-1
IVIIEYRKILR

SEQ ID NO: 5874 - protein, 11 aa, HIV-1
IIEYRKILRQR

SEQ ID NO: 5875 - protein, 11 aa, HIV-1
EYRKILRQRKI

SEQ ID NO: 5876 - protein, 11 aa, HIV-1
KILRQRKIDRL

SEQ ID NO: 5877 - protein, 11 aa, HIV-1
ILRQRKIDRLI

SEQ ID NO: 5878 - protein, 11 aa, HIV-1
RQRKIDRLIDR

SEQ ID NO: 5879 - protein, 11 aa, HIV-1
NESEGEISALV

SEQ ID NO: 5880 - protein, 11 aa, HIV-1
SEGEISALVEM

SEQ ID NO: 5881 - protein, 11 aa, HIV-1
GEISALVEMGV

SEQ ID NO: 5882 - protein, 11 aa, HIV-1
ISALVEMGVEM

SEQ ID NO: 5883 - protein, 11 aa, HIV-1
MGVEMGHHAPW

SEQ ID NO: 5884 - protein, 11 aa, HIV-1
VEMGHHAPWDV

SEQ ID NO: 5885 - protein, 15 aa, HIV-1
AIIIAIVVWSIVIIE

SEQ ID NO: 5886 - protein, 9 aa, HIV-1
IIAIVVWSI

SEQ ID NO: 5887 - protein, 15 aa, HIV-1
AIIIAIVVWSIVIIE

SEQ ID NO: 5888 - protein, 9 aa, HIV-1
IVVWSIVII

SEQ ID NO: 5889 - protein, 15 aa, HIV-1
AIVALVVAIIIAIVV

SEQ ID NO: 5890 - protein, 9 aa, HIV-1
IVALVVAII

SEQ ID NO: 5891 - protein, 15 aa, HIV-1
AIVALVVAIIIAIVV

SEQ ID NO: 5892 - protein, 9 aa, HIV-1
LVVAIIIAI

SEQ ID NO: 5893 - protein, 15 aa, HIV-1
AIVVWSIVIIEYRKI

SEQ ID NO: 5894 - protein, 9 aa, HIV-1
IVVWSIVII

SEQ ID NO: 5895 - protein, 15 aa, HIV-1
AIVVWSIVIIEYRKI

SEQ ID NO: 5896 - protein, 9 aa, HIV-1
VVWSIVIIE

SEQ ID NO: 5897 - protein, 15 aa, HIV-1
AIVVWSIVIIEYRKI

SEQ ID NO: 5898 - protein, 9 aa, HIV-1
WSIVIIEYR

SEQ ID NO: 5899 - protein, 15 aa, HIV-1
ALVEMGVEMGHHAPW

SEQ ID NO: 5900 - protein, 9 aa, HIV-1
LVEMGVEMG

SEQ ID NO: 5901 - protein, 15 aa, HIV-1
ALVVAIIIAIVVWSI

SEQ ID NO: 5902 - protein, 9 aa, HIV-1
IIIAIVVWS

SEQ ID NO: 5903 - protein, 15 aa, HIV-1
ALVVAIIIAIVVWSI

SEQ ID NO: 5904 - protein, 9 aa, HIV-1
VAIIIAIVV

SEQ ID NO: 5905 - protein, 15 aa, HIV-1
ALVVAIIIAIVVWSI

SEQ ID NO: 5906 - protein, 9 aa, HIV-1
VVAIIIAIV

SEQ ID NO: 5907 - protein, 15 aa, HIV-1
EGEISALVEMGVEMG

SEQ ID NO: 5908 - protein, 9 aa, HIV-1
ISALVEMGV

SEQ ID NO: 5909 - protein, 15 aa, HIV-1
EISALVEMGVEMGHH

SEQ ID NO: 5910 - protein, 9 aa, HIV-1
LVEMGVEMG

SEQ ID NO: 5911 - protein, 15 aa, HIV-1
EMGVEMGHHAPWDVD

SEQ ID NO: 5912 - protein, 9 aa, HIV-1
MGHHAPWDV

SEQ ID NO: 5913 - protein, 15 aa, HIV-1
EYRKILRQRKIDRLI

SEQ ID NO: 5914 - protein, 9 aa, HIV-1
ILRQRKIDR

SEQ ID NO: 5915 - protein, 15 aa, HIV-1
EYRKILRQRKIDRLI

SEQ ID NO: 5916 - protein, 9 aa, HIV-1
LRQRKIDRL

SEQ ID NO: 5917 - protein, 15 aa, HIV-1
EYRKILRQRKIDRLI

SEQ ID NO: 5918 - protein, 9 aa, HIV-1
YRKILRQRK

SEQ ID NO: 5919 - protein, 15 aa, HIV-1
GEISALVEMGVEMGH

SEQ ID NO: 5920 - protein, 9 aa, HIV-1
LVEMGVEMG

SEQ ID NO: 5921 - protein, 15 aa, HIV-1
GVEMGHHAPWDVDDL

SEQ ID NO: 5922 - protein, 9 aa, HIV-1
MGHHAPWDV

SEQ ID NO: 5923 - protein, 15 aa, HIV-1
IAIVVWSIVIIEYRK

SEQ ID NO: 5924 - protein, 9 aa, HIV-1
IVVWSIVII

SEQ ID NO: 5925 - protein, 15 aa, HIV-1
IEYRKILRQRKIDRL

SEQ ID NO: 5926 - protein, 9 aa, HIV-1
ILRQRKIDR

SEQ ID NO: 5927 - protein, 15 aa, HIV-1
IEYRKILRQRKIDRL

SEQ ID NO: 5928 - protein, 9 aa, HIV-1
YRKILRQRK

SEQ ID NO: 5929 - protein, 15 aa, HIV-1
IIAIVVWSIVIIEYR

SEQ ID NO: 5930 - protein, 9 aa, HIV-1
IIAIVVWSI

SEQ ID NO: 5931 - protein, 15 aa, HIV-1
IIAIVVWSIVIIEYR

SEQ ID NO: 5932 - protein, 9 aa, HIV-1
IVVWSIVII

SEQ ID NO: 5933 - protein, 15 aa, HIV-1
IIEYRKILRQRKIDR

SEQ ID NO: 5934 - protein, 9 aa, HIV-1
EYRKILRQR

SEQ ID NO: 5935 - protein, 15 aa, HIV-1
IIEYRKILRQRKIDR

SEQ ID NO: 5936 - protein, 9 aa, HIV-1
YRKILRQRK

SEQ ID NO: 5937 - protein, 15 aa, HIV-1
IIIAIVVWSIVIIEY

SEQ ID NO: 5938 - protein, 9 aa, HIV-1
IIAIVVWSI

SEQ ID NO: 5939 - protein, 15 aa, HIV-1
IIIAIVVWSIVIIEY

SEQ ID NO: 5940 - protein, 9 aa, HIV-1
IVVWSIVII

SEQ ID NO: 5941 - protein, 15 aa, HIV-1
ILRQRKIDRLIDRLI

SEQ ID NO: 5942 - protein, 9 aa, HIV-1
ILRQRKIDR

SEQ ID NO: 5943 - protein, 15 aa, HIV-1
IPIVAIVALVVAIII

SEQ ID NO: 5944 - protein, 9 aa, HIV-1
IVAIVALVV

SEQ ID NO: 5945 - protein, 15 aa, HIV-1
IPIVAIVALVVAIII

SEQ ID NO: 5946 - protein, 9 aa, HIV-1
VAIVALVVA

SEQ ID NO: 5947 - protein, 15 aa, HIV-1
ISALVEMGVEMGHHA

SEQ ID NO: 5948 - protein, 9 aa, HIV-1
LVEMGVEMG

SEQ ID NO: 5949 - protein, 15 aa, HIV-1
IVAIVALVVAIIIAI

SEQ ID NO: 5950 - protein, 9 aa, HIV-1
IVAIVALVV

SEQ ID NO: 5951 - protein, 15 aa, HIV-1
IVAIVALVVAIIIAI

SEQ ID NO: 5952 - protein, 9 aa, HIV-1
IVALVVAII

SEQ ID NO: 5953 - protein, 15 aa, HIV-1
IVAIVALVVAIIIAI

SEQ ID NO: 5954 - protein, 9 aa, HIV-1
VAIVALVVA

SEQ ID NO: 5955 - protein, 15 aa, HIV-1
IVALVVAIIIAIVVW

SEQ ID NO: 5956 - protein, 9 aa, HIV-1
LVVAIIIAI

SEQ ID NO: 5957 - protein, 15 aa, HIV-1
IVALVVAIIIAIVVW

SEQ ID NO: 5958 - protein, 9 aa, HIV-1
VAIIIAIVV

SEQ ID NO: 5959 - protein, 15 aa, HIV-1
IVIIEYRKILRQRKI

SEQ ID NO: 5960 - protein, 9 aa, HIV-1
IIEYRKILR

SEQ ID NO: 5961 - protein, 15 aa, HIV-1
IVIIEYRKILRQRKI

SEQ ID NO: 5962 - protein, 9 aa, HIV-1
YRKILRQRK

SEQ ID NO: 5963 - protein, 15 aa, HIV-1
IVVWSIVIIEYRKIL

SEQ ID NO: 5964 - protein, 9 aa, HIV-1
IVVWSIVII

SEQ ID NO: 5965 - protein, 15 aa, HIV-1
KILRQRKIDRLIDRL

SEQ ID NO: 5966 - protein, 9 aa, HIV-1
ILRQRKIDR

SEQ ID NO: 5967 - protein, 15 aa, HIV-1
KILRQRKIDRLIDRL

SEQ ID NO: 5968 - protein, 9 aa, HIV-1
LRQRKIDRL

SEQ ID NO: 5969 - protein, 15 aa, HIV-1
LVVAIIIAIVVWSIV

SEQ ID NO: 5970 - protein, 9 aa, HIV-1
IIAIVVWSI

SEQ ID NO: 5971 - protein, 15 aa, HIV-1
LVVAIIIAIVVWSIV

SEQ ID NO: 5972 - protein, 9 aa, HIV-1
IIIAIVVWS

SEQ ID NO: 5973 - protein, 15 aa, HIV-1
LVVAIIIAIVVWSIV

SEQ ID NO: 5974 - protein, 9 aa, HIV-1
VAIIIAIVV

SEQ ID NO: 5975 - protein, 15 aa, HIV-1
MGVEMGHHAPWDVDD

SEQ ID NO: 5976 - protein, 9 aa, HIV-1
MGHHAPWDV

SEQ ID NO: 5977 - protein, 15 aa, HIV-1
MQPIPIVAIVALVVA

SEQ ID NO: 5978 - protein, 9 aa, HIV-1
IPIVAIVAL

SEQ ID NO: 5979 - protein, 15 aa, HIV-1
MQPIPIVAIVALVVA

SEQ ID NO: 5980 - protein, 9 aa, HIV-1
IVAIVALVV

SEQ ID NO: 5981 - protein, 15 aa, HIV-1
PIPIVAIVALVVAII

SEQ ID NO: 5982 - protein, 9 aa, HIV-1
IVAIVALVV

SEQ ID NO: 5983 - protein, 15 aa, HIV-1
PIPIVAIVALVVAII

SEQ ID NO: 5984 - protein, 9 aa, HIV-1
VAIVALVVA

SEQ ID NO: 5985 - protein, 15 aa, HIV-1
PIVAIVALVVAIIIA

SEQ ID NO: 5986 - protein, 9 aa, HIV-1
IVAIVALVV

SEQ ID NO: 5987 - protein, 15 aa, HIV-1
PIVAIVALVVAIIIA

SEQ ID NO: 5988 - protein, 9 aa, HIV-1
VAIVALVVA

SEQ ID NO: 5989 - protein, 15 aa, HIV-1
QPIPIVAIVALVVAI

SEQ ID NO: 5990 - protein, 9 aa, HIV-1
IVAIVALVV

SEQ ID NO: 5991 - protein, 15 aa, HIV-1
QPIPIVAIVALVVAI

SEQ ID NO: 5992 - protein, 9 aa, HIV-1
VAIVALVVA

SEQ ID NO: 5993 - protein, 15 aa, HIV-1
RKILRQRKIDRLIDR

SEQ ID NO: 5994 - protein, 9 aa, HIV-1
ILRQRKIDR

SEQ ID NO: 5995 - protein, 15 aa, HIV-1
RKILRQRKIDRLIDR

SEQ ID NO: 5996 - protein, 9 aa, HIV-1
LRQRKIDRL

SEQ ID NO: 5997 - protein, 15 aa, HIV-1
SALVEMGVEMGHHAP

SEQ ID NO: 5998 - protein, 9 aa, HIV-1
LVEMGVEMG

SEQ ID NO: 5999 - protein, 15 aa, HIV-1
SIVIIEYRKILRQRK

SEQ ID NO: 6000 - protein, 9 aa, HIV-1
IEYRKILRQ

SEQ ID NO: 6001 - protein, 15 aa, HIV-1
SIVIIEYRKILRQRK

SEQ ID NO: 6002 - protein, 9 aa, HIV-1
IIEYRKILR

SEQ ID NO: 6003 - protein, 15 aa, HIV-1
SIVIIEYRKILRQRK

SEQ ID NO: 6004 - protein, 9 aa, HIV-1
VIIEYRKIL

SEQ ID NO: 6005 - protein, 15 aa, HIV-1
VAIIIAIVVWSIVII

SEQ ID NO: 6006 - protein, 9 aa, HIV-1
AIVVWSIVI

SEQ ID NO: 6007 - protein, 15 aa, HIV-1
VAIIIAIVVWSIVII

SEQ ID NO: 6008 - protein, 9 aa, HIV-1
IAIVVWSIV

SEQ ID NO: 6009 - protein, 15 aa, HIV-1
VAIIIAIVVWSIVII

SEQ ID NO: 6010 - protein, 9 aa, HIV-1
IIAIVVWSI

SEQ ID NO: 6011 - protein, 15 aa, HIV-1
VAIIIAIVVWSIVII

SEQ ID NO: 6012 - protein, 9 aa, HIV-1
IIIAIVVWS

SEQ ID NO: 6013 - protein, 15 aa, HIV-1
VAIVALVVAIIIAIV

SEQ ID NO: 6014 - protein, 9 aa, HIV-1
IVALVVAII

SEQ ID NO: 6015 - protein, 15 aa, HIV-1
VAIVALVVAIIIAIV

SEQ ID NO: 6016 - protein, 9 aa, HIV-1
LVVAIIIAI

SEQ ID NO: 6017 - protein, 15 aa, HIV-1
VALVVAIIIAIVVWS

SEQ ID NO: 6018 - protein, 9 aa, HIV-1
LVVAIIIAI

SEQ ID NO: 6019 - protein, 15 aa, HIV-1
VALVVAIIIAIVVWS

SEQ ID NO: 6020 - protein, 9 aa, HIV-1
VAIIIAIVV

SEQ ID NO: 6021 - protein, 15 aa, HIV-1
VALVVAIIIAIVVWS

SEQ ID NO: 6022 - protein, 9 aa, HIV-1
VVAIIIAIV

SEQ ID NO: 6023 - protein, 15 aa, HIV-1
VEMGVEMGHHAPWDV

SEQ ID NO: 6024 - protein, 9 aa, HIV-1
MGVEMGHHA

SEQ ID NO: 6025 - protein, 15 aa, HIV-1
VIIEYRKILRQRKID

SEQ ID NO: 6026 - protein, 9 aa, HIV-1
EYRKILRQR

SEQ ID NO: 6027 - protein, 15 aa, HIV-1
VIIEYRKILRQRKID

SEQ ID NO: 6028 - protein, 9 aa, HIV-1
YRKILRQRK

SEQ ID NO: 6029 - protein, 15 aa, HIV-1
VVAIIIAIVVWSIVI

SEQ ID NO: 6030 - protein, 9 aa, HIV-1
IIAIVVWSI

SEQ ID NO: 6031 - protein, 15 aa, HIV-1
VVAIIIAIVVWSIVI

SEQ ID NO: 6032 - protein, 9 aa, HIV-1
IIIAIVVWS

SEQ ID NO: 6033 - protein, 15 aa, HIV-1
VVWSIVIIEYRKILR

SEQ ID NO: 6034 - protein, 9 aa, HIV-1
WSIVIIEYR

SEQ ID NO: 6035 - protein, 15 aa, HIV-1
VWSIVIIEYRKILRQ

SEQ ID NO: 6036 - protein, 9 aa, HIV-1
IIEYRKILR

SEQ ID NO: 6037 - protein, 15 aa, HIV-1
WSIVIIEYRKILRQR

SEQ ID NO: 6038 - protein, 9 aa, HIV-1
IIEYRKILR

SEQ ID NO: 6039 - protein, 15 aa, HIV-1
YRKILRQRKIDRLID

SEQ ID NO: 6040 - protein, 9 aa, HIV-1
ILRQRKIDR

SEQ ID NO: 6041 - protein, 15 aa, HIV-1
YRKILRQRKIDRLID

SEQ ID NO: 6042 - protein, 9 aa, HIV-1
LRQRKIDRL

SEQ ID NO: 6043 - protein, 15 aa, HIV-1
YRKILRQRKIDRLID

SEQ ID NO: 6044 - protein, 9 aa, HIV-1
YRKILRQRK

SEQ ID NO: 6045 - protein, 8 aa, HIV-1
ELIRTVRL

SEQ ID NO: 6046 - protein, 8 aa, HIV-1
LIRTVRLI

SEQ ID NO: 6047 - protein, 8 aa, HIV-1
RTVRLIKL

SEQ ID NO: 6048 - protein, 8 aa, HIV-1
RLIKLLYQ

SEQ ID NO: 6049 - protein, 8 aa, HIV-1
RQARRNRR

SEQ ID NO: 6050 - protein, 8 aa, HIV-1
QARRNRRR

SEQ ID NO: 6051 - protein, 8 aa, HIV-1
RRNRRRRW

SEQ ID NO: 6052 - protein, 8 aa, HIV-1
RNRRRRWR

SEQ ID NO: 6053 - protein, 8 aa, HIV-1
RRRRWRER

SEQ ID NO: 6054 - protein, 8 aa, HIV-1
RRWRERQR

SEQ ID NO: 6055 - protein, 8 aa, HIV-1
RQRQIHSI

SEQ ID NO: 6056 - protein, 8 aa, HIV-1
RQIHSISE

SEQ ID NO: 6057 - protein, 8 aa, HIV-1
QIHSISER

SEQ ID NO: 6058 - protein, 8 aa, HIV-1
SERILGTY

SEQ ID NO: 6059 - protein, 8 aa, HIV-1
ILGTYLGR

SEQ ID NO: 6060 - protein, 8 aa, HIV-1
RSAEPVPL

SEQ ID NO: 6061 - protein, 8 aa, HIV-1
AEPVPLQL

SEQ ID NO: 6062 - protein, 8 aa, HIV-1
VPLQLPPL

SEQ ID NO: 6063 - protein, 8 aa, HIV-1
LQLPPLER

SEQ ID NO: 6064 - protein, 8 aa, HIV-1
QLPPLERL

SEQ ID NO: 6065 - protein, 8 aa, HIV-1
LPPLERLT

SEQ ID NO: 6066 - protein, 8 aa, HIV-1
PPLERLTL

SEQ ID NO: 6067 - protein, 8 aa, HIV-1
GTSGTQGV

SEQ ID NO: 6068 - protein, 8 aa, HIV-1
VGSPQILV

SEQ ID NO: 6069 - protein, 8 aa, HIV-1
ILVESPTV

SEQ ID NO: 6070 - protein, 8 aa, HIV-1
TVLESGTK

SEQ ID NO: 6071 - protein, 9 aa, HIV-1
EELIRTVRL

SEQ ID NO: 6072 - protein, 9 aa, HIV-1
ELIRTVRLI

SEQ ID NO: 6073 - protein, 9 aa, HIV-1
LIRTVRLIK

SEQ ID NO: 6074 - protein, 9 aa, HIV-1
TVRLIKLLY

SEQ ID NO: 6075 - protein, 9 aa, HIV-1
RLIKLLYQS

SEQ ID NO: 6076 - protein, 9 aa, HIV-1
GTRQARRNR

SEQ ID NO: 6077 - protein, 9 aa, HIV-1
RQARRNRRR

SEQ ID NO: 6078 - protein, 9 aa, HIV-1
QARRNRRRR

SEQ ID NO: 6079 - protein, 9 aa, HIV-1
RRNRRRRWR

SEQ ID NO: 6080 - protein, 9 aa, HIV-1
NRRRRWRER

SEQ ID NO: 6081 - protein, 9 aa, HIV-1
RRRRWRERQ

SEQ ID NO: 6082 - protein, 9 aa, HIV-1
RRRWRERQR

SEQ ID NO: 6083 - protein, 9 aa, HIV-1
RRWRERQRQ

SEQ ID NO: 6084 - protein, 9 aa, HIV-1
RQIHSISER

SEQ ID NO: 6085 - protein, 9 aa, HIV-1
QIHSISERI

SEQ ID NO: 6086 - protein, 9 aa, HIV-1
IHSISERIL

SEQ ID NO: 6087 - protein, 9 aa, HIV-1
SISERILGT

SEQ ID NO: 6088 - protein, 9 aa, HIV-1
ISERILGTY

SEQ ID NO: 6089 - protein, 9 aa, HIV-1
SERILGTYL

SEQ ID NO: 6090 - protein, 9 aa, HIV-1
RILGTYLGR

SEQ ID NO: 6091 - protein, 9 aa, HIV-1
ILGTYLGRS

SEQ ID NO: 6092 - protein, 9 aa, HIV-1
YLGRSAEPV

SEQ ID NO: 6093 - protein, 9 aa, HIV-1
SAEPVPLQL

SEQ ID NO: 6094 - protein, 9 aa, HIV-1
PVPLQLPPL

SEQ ID NO: 6095 - protein, 9 aa, HIV-1
LQLPPLERL

SEQ ID NO: 6096 - protein, 9 aa, HIV-1
QLPPLERLT

SEQ ID NO: 6097 - protein, 9 aa, HIV-1
LPPLERLTL

SEQ ID NO: 6098 - protein, 9 aa, HIV-1
CGTSGTQGV

SEQ ID NO: 6099 - protein, 9 aa, HIV-1
TQGVGSPQI

SEQ ID NO: 6100 - protein, 9 aa, HIV-1
GVGSPQILV

SEQ ID NO: 6101 - protein, 9 aa, HIV-1
QILVESPTV

SEQ ID NO: 6102 - protein, 9 aa, HIV-1
ILVESPTVL

SEQ ID NO: 6103 - protein, 10 aa, HIV-1
DSDEELIRTV

SEQ ID NO: 6104 - protein, 10 aa, HIV-1
DEELIRTVRL

SEQ ID NO: 6105 - protein, 10 aa, HIV-1
ELIRTVRLIK

SEQ ID NO: 6106 - protein, 10 aa, HIV-1
LIRTVRLIKL

SEQ ID NO: 6107 - protein, 10 aa, HIV-1
RTVRLIKLLY

SEQ ID NO: 6108 - protein, 10 aa, HIV-1
GTRQARRNRR

SEQ ID NO: 6109 - protein, 10 aa, HIV-1
TRQARRNRRR

SEQ ID NO: 6110 - protein, 10 aa, HIV-1
RQARRNRRRR

SEQ ID NO: 6111 - protein, 10 aa, HIV-1
ARRNRRRRWR

SEQ ID NO: 6112 - protein, 10 aa, HIV-1
RNRRRRWRER

SEQ ID NO: 6113 - protein, 10 aa, HIV-1
RRRRWRERQR

SEQ ID NO: 6114 - protein, 10 aa, HIV-1
RRWRERQRQI

SEQ ID NO: 6115 - protein, 10 aa, HIV-1
RERQRQIHSI

SEQ ID NO: 6116 - protein, 10 aa, HIV-1
RQIHSISERI

SEQ ID NO: 6117 - protein, 10 aa, HIV-1
SISERILGTY

SEQ ID NO: 6118 - protein, 10 aa, HIV-1
ERILGTYLGR

SEQ ID NO: 6119 - protein, 10 aa, HIV-1
ILGTYLGRSA

SEQ ID NO: 6120 - protein, 10 aa, HIV-1
TYLGRSAEPV

SEQ ID NO: 6121 - protein, 10 aa, HIV-1
RSAEPVPLQL

SEQ ID NO: 6122 - protein, 10 aa, HIV-1
EPVPLQLPPL

SEQ ID NO: 6123 - protein, 10 aa, HIV-1
PLQLPPLERL

SEQ ID NO: 6124 - protein, 10 aa, HIV-1
LQLPPLERLT

SEQ ID NO: 6125 - protein, 10 aa, HIV-1
QLPPLERLTL

SEQ ID NO: 6126 - protein, 10 aa, HIV-1
TLDCNEDCGT

SEQ ID NO: 6127 - protein, 10 aa, HIV-1
QGVGSPQILV

SEQ ID NO: 6128 - protein, 10 aa, HIV-1
PQILVESPTV

SEQ ID NO: 6129 - protein, 11 aa, HIV-1
DSDEELIRTVR

SEQ ID NO: 6130 - protein, 11 aa, HIV-1
ELIRTVRLIKL

SEQ ID NO: 6131 - protein, 11 aa, HIV-1
LIRTVRLIKLL

SEQ ID NO: 6132 - protein, 11 aa, HIV-1
GTRQARRNRRR

SEQ ID NO: 6133 - protein, 11 aa, HIV-1
QARRNRRRRWR

SEQ ID NO: 6134 - protein, 11 aa, HIV-1
RRNRRRRWRER

SEQ ID NO: 6135 - protein, 11 aa, HIV-1
RRRRWRERQRQ

SEQ ID NO: 6136 - protein, 11 aa, HIV-1
RRRWRERQRQI

SEQ ID NO: 6137 - protein, 11 aa, HIV-1
RRWRERQRQIH

SEQ ID NO: 6138 - protein, 11 aa, HIV-1
RQRQIHSISER

SEQ ID NO: 6139 - protein, 11 aa, HIV-1
RQIHSISERIL

SEQ ID NO: 6140 - protein, 11 aa, HIV-1
HSISERILGTY

SEQ ID NO: 6141 - protein, 11 aa, HIV-1
SISERILGTYL

SEQ ID NO: 6142 - protein, 11 aa, HIV-1
RILGTYLGRSA

SEQ ID NO: 6143 - protein, 11 aa, HIV-1
GTYLGRSAEPV

SEQ ID NO: 6144 - protein, 11 aa, HIV-1
YLGRSAEPVPL

SEQ ID NO: 6145 - protein, 11 aa, HIV-1
AEPVPLQLPPL

SEQ ID NO: 6146 - protein, 11 aa, HIV-1
VPLQLPPLERL

SEQ ID NO: 6147 - protein, 11 aa, HIV-1
LQLPPLERLTL

SEQ ID NO: 6148 - protein, 11 aa, HIV-1
TQGVGSPQILV

SEQ ID NO: 6149 - protein, 11 aa, HIV-1
ESPTVLESGTK

SEQ ID NO: 6150 - protein, 15 aa, HIV-1
AEPVPLQLPPLERLT

SEQ ID NO: 6151 - protein, 9 aa, HIV-1
LQLPPLERL

SEQ ID NO: 6152 - protein, 15 aa, HIV-1
AEPVPLQLPPLERLT

SEQ ID NO: 6153 - protein, 9 aa, HIV-1
VPLQLPPLE

SEQ ID NO: 6154 - protein, 15 aa, HIV-1
ARRNRRRRWRERQRQ

SEQ ID NO: 6155 - protein, 9 aa, HIV-1
NRRRRWRER

SEQ ID NO: 6156 - protein, 15 aa, HIV-1
DEELIRTVRLIKLLY

SEQ ID NO: 6157 - protein, 9 aa, HIV-1
IRTVRLIKL

SEQ ID NO: 6158 - protein, 15 aa, HIV-1
DSDEELIRTVRLIKL

SEQ ID NO: 6159 - protein, 9 aa, HIV-1
EELIRTVRL

SEQ ID NO: 6160 - protein, 15 aa, HIV-1
DSDEELIRTVRLIKL

SEQ ID NO: 6161 - protein, 9 aa, HIV-1
LIRTVRLIK

SEQ ID NO: 6162 - protein, 15 aa, HIV-1
EELIRTVRLIKLLYQ

SEQ ID NO: 6163 - protein, 9 aa, HIV-1
IRTVRLIKL

SEQ ID NO: 6164 - protein, 15 aa, HIV-1
EELIRTVRLIKLLYQ

SEQ ID NO: 6165 - protein, 9 aa, HIV-1
LIRTVRLIK

SEQ ID NO: 6166 - protein, 15 aa, HIV-1
EELIRTVRLIKLLYQ

SEQ ID NO: 6167 - protein, 9 aa, HIV-1
TVRLIKLLY

SEQ ID NO: 6168 - protein, 15 aa, HIV-1
EGTRQARRNRRRRWR

SEQ ID NO: 6169 - protein, 9 aa, HIV-1
RQARRNRRR

SEQ ID NO: 6170 - protein, 15 aa, HIV-1
EGTRQARRNRRRRWR

SEQ ID NO: 6171 - protein, 9 aa, HIV-1
TRQARRNRR

SEQ ID NO: 6172 - protein, 15 aa, HIV-1
ELIRTVRLIKLLYQS

SEQ ID NO: 6173 - protein, 9 aa, HIV-1
IRTVRLIKL

SEQ ID NO: 6174 - protein, 15 aa, HIV-1
ELIRTVRLIKLLYQS

SEQ ID NO: 6175 - protein, 9 aa, HIV-1
TVRLIKLLY

SEQ ID NO: 6176 - protein, 15 aa, HIV-1
ELIRTVRLIKLLYQS

SEQ ID NO: 6177 - protein, 9 aa, HIV-1
VRLIKLLYQ

SEQ ID NO: 6178 - protein, 15 aa, HIV-1
EPVPLQLPPLERLTL

SEQ ID NO: 6179 - protein, 9 aa, HIV-1
LQLPPLERL

SEQ ID NO: 6180 - protein, 15 aa, HIV-1
EPVPLQLPPLERLTL

SEQ ID NO: 6181 - protein, 9 aa, HIV-1
VPLQLPPLE

SEQ ID NO: 6182 - protein, 15 aa, HIV-1
ERILGTYLGRSAEPV

SEQ ID NO: 6183 - protein, 9 aa, HIV-1
ILGTYLGRS

SEQ ID NO: 6184 - protein, 15 aa, HIV-1
ERILGTYLGRSAEPV

SEQ ID NO: 6185 - protein, 9 aa, HIV-1
LGTYLGRSA

SEQ ID NO: 6186 - protein, 15 aa, HIV-1
GRSAEPVPLQLPPLE

SEQ ID NO: 6187 - protein, 9 aa, HIV-1
GRSAEPVPL

SEQ ID NO: 6188 - protein, 15 aa, HIV-1
GRSAEPVPLQLPPLE

SEQ ID NO: 6189 - protein, 9 aa, HIV-1
PVPLQLPPL

SEQ ID NO: 6190 - protein, 15 aa, HIV-1
GSPQILVESPTVLES

SEQ ID NO: 6191 - protein, 9 aa, HIV-1
ILVESPTVL

SEQ ID NO: 6192 - protein, 15 aa, HIV-1
GSPQILVESPTVLES

SEQ ID NO: 6193 - protein, 9 aa, HIV-1
LVESPTVLE

SEQ ID NO: 6194 - protein, 15 aa, HIV-1
GTRQARRNRRRRWRE

SEQ ID NO: 6195 - protein, 9 aa, HIV-1
RQARRNRRR

SEQ ID NO: 6196 - protein, 15 aa, HIV-1
GTYLGRSAEPVPLQL

SEQ ID NO: 6197 - protein, 9 aa, HIV-1
YLGRSAEPV

SEQ ID NO: 6198 - protein, 15 aa, HIV-1
GVGSPQILVESPTVL

SEQ ID NO: 6199 - protein, 9 aa, HIV-1
PQILVESPT

SEQ ID NO: 6200 - protein, 15 aa, HIV-1
HSISERILGTYLGRS

SEQ ID NO: 6201 - protein, 9 aa, HIV-1
ERILGTYLG

SEQ ID NO: 6202 - protein, 15 aa, HIV-1
IKLLYQSNPPPNPEG

SEQ ID NO: 6203 - protein, 9 aa, HIV-1
LLYQSNPPP

SEQ ID NO: 6204 - protein, 15 aa, HIV-1
IKLLYQSNPPPNPEG

SEQ ID NO: 6205 - protein, 9 aa, HIV-1
LYQSNPPPN

SEQ ID NO: 6206 - protein, 15 aa, HIV-1
IKLLYQSNPPPNPEG

SEQ ID NO: 6207 - protein, 9 aa, HIV-1
YQSNPPPNP

SEQ ID NO: 6208 - protein, 15 aa, HIV-1
ILGTYLGRSAEPVPL

SEQ ID NO: 6209 - protein, 9 aa, HIV-1
ILGTYLGRS

SEQ ID NO: 6210 - protein, 15 aa, HIV-1
ILGTYLGRSAEPVPL

SEQ ID NO: 6211 - protein, 9 aa, HIV-1
YLGRSAEPV

SEQ ID NO: 6212 - protein, 15 aa, HIV-1
ILVESPTVLESGTKE

SEQ ID NO: 6213 - protein, 9 aa, HIV-1
ILVESPTVL

SEQ ID NO: 6214 - protein, 15 aa, HIV-1
ILVESPTVLESGTKE

SEQ ID NO: 6215 - protein, 9 aa, HIV-1
LVESPTVLE

SEQ ID NO: 6216 - protein, 15 aa, HIV-1
IRTVRLIKLLYQSNP

SEQ ID NO: 6217 - protein, 9 aa, HIV-1
IRTVRLIKL

SEQ ID NO: 6218 - protein, 15 aa, HIV-1
IRTVRLIKLLYQSNP

SEQ ID NO: 6219 - protein, 9 aa, HIV-1
TVRLIKLLY

SEQ ID NO: 6220 - protein, 15 aa, HIV-1
IRTVRLIKLLYQSNP

SEQ ID NO: 6221 - protein, 9 aa, HIV-1
VRLIKLLYQ

SEQ ID NO: 6222 - protein, 15 aa, HIV-1
ISERILGTYLGRSAE

SEQ ID NO: 6223 - protein, 9 aa, HIV-1
ERILGTYLG

SEQ ID NO: 6224 - protein, 15 aa, HIV-1
ISERILGTYLGRSAE

SEQ ID NO: 6225 - protein, 9 aa, HIV-1
ILGTYLGRS

SEQ ID NO: 6226 - protein, 15 aa, HIV-1
ISERILGTYLGRSAE

SEQ ID NO: 6227 - protein, 9 aa, HIV-1
LGTYLGRSA

SEQ ID NO: 6228 - protein, 15 aa, HIV-1
KLLYQSNPPPNPEGT

SEQ ID NO: 6229 - protein, 9 aa, HIV-1
LYQSNPPPN

SEQ ID NO: 6230 - protein, 15 aa, HIV-1
KLLYQSNPPPNPEGT

SEQ ID NO: 6231 - protein, 9 aa, HIV-1
YQSNPPPNP

SEQ ID NO: 6232 - protein, 15 aa, HIV-1
LGTYLGRSAEPVPLQ

SEQ ID NO: 6233 - protein, 9 aa, HIV-1
YLGRSAEPV

SEQ ID NO: 6234 - protein, 15 aa, HIV-1
LIKLLYQSNPPPNPE

SEQ ID NO: 6235 - protein, 9 aa, HIV-1
LLYQSNPPP

SEQ ID NO: 6236 - protein, 15 aa, HIV-1
LIKLLYQSNPPPNPE

SEQ ID NO: 6237 - protein, 9 aa, HIV-1
LYQSNPPPN

SEQ ID NO: 6238 - protein, 15 aa, HIV-1
LIKLLYQSNPPPNPE

SEQ ID NO: 6239 - protein, 9 aa, HIV-1
YQSNPPPNP

SEQ ID NO: 6240 - protein, 15 aa, HIV-1
LIRTVRLIKLLYQSN

SEQ ID NO: 6241 - protein, 9 aa, HIV-1
IRTVRLIKL

SEQ ID NO: 6242 - protein, 15 aa, HIV-1
LIRTVRLIKLLYQSN

SEQ ID NO: 6243 - protein, 9 aa, HIV-1
TVRLIKLLY

SEQ ID NO: 6244 - protein, 15 aa, HIV-1
LIRTVRLIKLLYQSN

SEQ ID NO: 6245 - protein, 9 aa, HIV-1
VRLIKLLYQ

SEQ ID NO: 6246 - protein, 15 aa, HIV-1
LLYQSNPPPNPEGTR

SEQ ID NO: 6247 - protein, 9 aa, HIV-1
YQSNPPPNP

SEQ ID NO: 6248 - protein, 15 aa, HIV-1
LPPLERLTLDCNEDC

SEQ ID NO: 6249 - protein, 9 aa, HIV-1
LERLTLDCN

SEQ ID NO: 6250 - protein, 15 aa, HIV-1
LQLPPLERLTLDCNE

SEQ ID NO: 6251 - protein, 9 aa, HIV-1
LERLTLDCN

SEQ ID NO: 6252 - protein, 15 aa, HIV-1
LQLPPLERLTLDCNE

SEQ ID NO: 6253 - protein, 9 aa, HIV-1
LQLPPLERL

SEQ ID NO: 6254 - protein, 15 aa, HIV-1
LYQSNPPPNPEGTRQ

SEQ ID NO: 6255 - protein, 9 aa, HIV-1
YQSNPPPNP

SEQ ID NO: 6256 - protein, 15 aa, HIV-1
NPEGTRQARRNRRRR

SEQ ID NO: 6257 - protein, 9 aa, HIV-1
TRQARRNRR

SEQ ID NO: 6258 - protein, 15 aa, HIV-1
NRRRRWRERQRQIHS

SEQ ID NO: 6259 - protein, 9 aa, HIV-1
RRRWRERQR

SEQ ID NO: 6260 - protein, 15 aa, HIV-1
NRRRRWRERQRQIHS

SEQ ID NO: 6261 - protein, 9 aa, HIV-1
WRERQRQIH

SEQ ID NO: 6262 - protein, 15 aa, HIV-1
PEGTRQARRNRRRRW

SEQ ID NO: 6263 - protein, 9 aa, HIV-1
TRQARRNRR

SEQ ID NO: 6264 - protein, 15 aa, HIV-1
PLQLPPLERLTLDCN

SEQ ID NO: 6265 - protein, 9 aa, HIV-1
LQLPPLERL

SEQ ID NO: 6266 - protein, 15 aa, HIV-1
PNPEGTRQARRNRRR

SEQ ID NO: 6267 - protein, 9 aa, HIV-1
TRQARRNRR

SEQ ID NO: 6268 - protein, 15 aa, HIV-1
PPLERLTLDCNEDCG

SEQ ID NO: 6269 - protein, 9 aa, HIV-1
LERLTLDCN

SEQ ID NO: 6270 - protein, 15 aa, HIV-1
PPNPEGTRQARRNRR

SEQ ID NO: 6271 - protein, 9 aa, HIV-1
EGTRQARRN

SEQ ID NO: 6272 - protein, 15 aa, HIV-1
PQILVESPTVLESGT

SEQ ID NO: 6273 - protein, 9 aa, HIV-1
ILVESPTVL

SEQ ID NO: 6274 - protein, 15 aa, HIV-1
PQILVESPTVLESGT

SEQ ID NO: 6275 - protein, 9 aa, HIV-1
LVESPTVLE

SEQ ID NO: 6276 - protein, 15 aa, HIV-1
PVPLQLPPLERLTLD

SEQ ID NO: 6277 - protein, 9 aa, HIV-1
LQLPPLERL

SEQ ID NO: 6278 - protein, 15 aa, HIV-1
PVPLQLPPLERLTLD

SEQ ID NO: 6279 - protein, 9 aa, HIV-1
VPLQLPPLE

SEQ ID NO: 6280 - protein, 15 aa, HIV-1
QARRNRRRRWRERQR

SEQ ID NO: 6281 - protein, 9 aa, HIV-1
NRRRRWRER

SEQ ID NO: 6282 - protein, 15 aa, HIV-1
QILVESPTVLESGTK

SEQ ID NO: 6283 - protein, 9 aa, HIV-1
LVESPTVLE

SEQ ID NO: 6284 - protein, 15 aa, HIV-1
QLPPLERLTLDCNED

SEQ ID NO: 6285 - protein, 9 aa, HIV-1
LERLTLDCN

SEQ ID NO: 6286 - protein, 15 aa, HIV-1
RILGTYLGRSAEPVP

SEQ ID NO: 6287 - protein, 9 aa, HIV-1
ILGTYLGRS

SEQ ID NO: 6288 - protein, 15 aa, HIV-1
RILGTYLGRSAEPVP

SEQ ID NO: 6289 - protein, 9 aa, HIV-1
YLGRSAEPV

SEQ ID NO: 6290 - protein, 15 aa, HIV-1
RLIKLLYQSNPPPNP

SEQ ID NO: 6291 - protein, 9 aa, HIV-1
LIKLLYQSN

SEQ ID NO: 6292 - protein, 15 aa, HIV-1
RLIKLLYQSNPPPNP

SEQ ID NO: 6293 - protein, 9 aa, HIV-1
LLYQSNPPP

SEQ ID NO: 6294 - protein, 15 aa, HIV-1
RLIKLLYQSNPPPNP

SEQ ID NO: 6295 - protein, 9 aa, HIV-1
LYQSNPPPN

SEQ ID NO: 6296 - protein, 15 aa, HIV-1
RNRRRRWRERQRQIH

SEQ ID NO: 6297 - protein, 9 aa, HIV-1
RRRWRERQR

SEQ ID NO: 6298 - protein, 15 aa, HIV-1
RQARRNRRRRWRERQ

SEQ ID NO: 6299 - protein, 9 aa, HIV-1
NRRRRWRER

SEQ ID NO: 6300 - protein, 15 aa, HIV-1
RQARRNRRRRWRERQ

SEQ ID NO: 6301 - protein, 9 aa, HIV-1
RRNRRRRWR

SEQ ID NO: 6302 - protein, 15 aa, HIV-1
RRNRRRRWRERQRQI

SEQ ID NO: 6303 - protein, 9 aa, HIV-1
NRRRRWRER

SEQ ID NO: 6304 - protein, 15 aa, HIV-1
RRRRWRERQRQIHSI

SEQ ID NO: 6305 - protein, 9 aa, HIV-1
WRERQRQIH

SEQ ID NO: 6306 - protein, 15 aa, HIV-1
RRRWRERQRQIHSIS

SEQ ID NO: 6307 - protein, 9 aa, HIV-1
WRERQRQIH

SEQ ID NO: 6308 - protein, 15 aa, HIV-1
RRWRERQRQIHSISE

SEQ ID NO: 6309 - protein, 9 aa, HIV-1
WRERQRQIH

SEQ ID NO: 6310 - protein, 15 aa, HIV-1
RSAEPVPLQLPPLER

SEQ ID NO: 6311 - protein, 9 aa, HIV-1
VPLQLPPLE

SEQ ID NO: 6312 - protein, 15 aa, HIV-1
RTVRLIKLLYQSNPP

SEQ ID NO: 6313 - protein, 9 aa, HIV-1
IKLLYQSNP

SEQ ID NO: 6314 - protein, 15 aa, HIV-1
RTVRLIKLLYQSNPP

SEQ ID NO: 6315 - protein, 9 aa, HIV-1
VRLIKLLYQ

SEQ ID NO: 6316 - protein, 15 aa, HIV-1
SAEPVPLQLPPLERL

SEQ ID NO: 6317 - protein, 9 aa, HIV-1
PVPLQLPPL

SEQ ID NO: 6318 - protein, 15 aa, HIV-1
SAEPVPLQLPPLERL

SEQ ID NO: 6319 - protein, 9 aa, HIV-1
VPLQLPPLE

SEQ ID NO: 6320 - protein, 15 aa, HIV-1
SDEELIRTVRLIKLL

SEQ ID NO: 6321 - protein, 9 aa, HIV-1
IRTVRLIKL

SEQ ID NO: 6322 - protein, 15 aa, HIV-1
SERILGTYLGRSAEP

SEQ ID NO: 6323 - protein, 9 aa, HIV-1
ILGTYLGRS

SEQ ID NO: 6324 - protein, 15 aa, HIV-1
SERILGTYLGRSAEP

SEQ ID NO: 6325 - protein, 9 aa, HIV-1
LGTYLGRSA

SEQ ID NO: 6326 - protein, 15 aa, HIV-1
SISERILGTYLGRSA

SEQ ID NO: 6327 - protein, 9 aa, HIV-1
ERILGTYLG

SEQ ID NO: 6328 - protein, 15 aa, HIV-1
SISERILGTYLGRSA

SEQ ID NO: 6329 - protein, 9 aa, HIV-1
ILGTYLGRS

SEQ ID NO: 6330 - protein, 15 aa, HIV-1
SPQILVESPTVLESG

SEQ ID NO: 6331 - protein, 9 aa, HIV-1
ILVESPTVL

SEQ ID NO: 6332 - protein, 15 aa, HIV-1
SPQILVESPTVLESG

SEQ ID NO: 6333 - protein, 9 aa, HIV-1
LVESPTVLE

SEQ ID NO: 6334 - protein, 15 aa, HIV-1
TRQARRNRRRRWRER

SEQ ID NO: 6335 - protein, 9 aa, HIV-1
RRNRRRRWR

SEQ ID NO: 6336 - protein, 15 aa, HIV-1
TVRLIKLLYQSNPPP

SEQ ID NO: 6337 - protein, 9 aa, HIV-1
IKLLYQSNP

SEQ ID NO: 6338 - protein, 15 aa, HIV-1
TVRLIKLLYQSNPPP

SEQ ID NO: 6339 - protein, 9 aa, HIV-1
VRLIKLLYQ

SEQ ID NO: 6340 - protein, 15 aa, HIV-1
TYLGRSAEPVPLQLP

SEQ ID NO: 6341 - protein, 9 aa, HIV-1
YLGRSAEPV

SEQ ID NO: 6342 - protein, 15 aa, HIV-1
VGSPQILVESPTVLE

SEQ ID NO: 6343 - protein, 9 aa, HIV-1
ILVESPTVL

SEQ ID NO: 6344 - protein, 15 aa, HIV-1
VGSPQILVESPTVLE

SEQ ID NO: 6345 - protein, 9 aa, HIV-1
VGSPQILVE

SEQ ID NO: 6346 - protein, 15 aa, HIV-1
VPLQLPPLERLTLDC

SEQ ID NO: 6347 - protein, 9 aa, HIV-1
LQLPPLERL

SEQ ID NO: 6348 - protein, 15 aa, HIV-1
VPLQLPPLERLTLDC

SEQ ID NO: 6349 - protein, 9 aa, HIV-1
VPLQLPPLE

SEQ ID NO: 6350 - protein, 15 aa, HIV-1
VRLIKLLYQSNPPPN

SEQ ID NO: 6351 - protein, 9 aa, HIV-1
LLYQSNPPP

SEQ ID NO: 6352 - protein, 15 aa, HIV-1
YLGRSAEPVPLQLPP

SEQ ID NO: 6353 - protein, 9 aa, HIV-1
YLGRSAEPV

SEQ ID NO: 6354 - protein, 15 aa, HIV-1
YQSNPPPNPEGTRQA

SEQ ID NO: 6355 - protein, 9 aa, HIV-1
YQSNPPPNP

SEQ ID NO: 6356 - protein, 8 aa, HIV-1
EPHNEWTL

SEQ ID NO: 6357 - protein, 8 aa, HIV-1
HNEWTLEL

SEQ ID NO: 6358 - protein, 8 aa, HIV-1
NEWTLELL

SEQ ID NO: 6359 - protein, 8 aa, HIV-1
TLELLEEL

SEQ ID NO: 6360 - protein, 8 aa, HIV-1
EELKNEAV

SEQ ID NO: 6361 - protein, 8 aa, HIV-1
ELKNEAVR

SEQ ID NO: 6362 - protein, 8 aa, HIV-1
EAVRHFPR

SEQ ID NO: 6363 - protein, 8 aa, HIV-1
AVRHFPRI

SEQ ID NO: 6364 - protein, 8 aa, HIV-1
GQHIYETY

SEQ ID NO: 6365 - protein, 8 aa, HIV-1
ETYGDTWA

SEQ ID NO: 6366 - protein, 8 aa, HIV-1
YGDTWAGV

SEQ ID NO: 6367 - protein, 8 aa, HIV-1
DTWAGVEA

SEQ ID NO: 6368 - protein, 8 aa, HIV-1
TWAGVEAI

SEQ ID NO: 6369 - protein, 8 aa, HIV-1
VEAIIRIL

SEQ ID NO: 6370 - protein, 8 aa, HIV-1
RILQQLLF

SEQ ID NO: 6371 - protein, 8 aa, HIV-1
ILQQLLFI

SEQ ID NO: 6372 - protein, 8 aa, HIV-1
QQLLFIHF

SEQ ID NO: 6373 - protein, 8 aa, HIV-1
QLLFIHFR

SEQ ID NO: 6374 - protein, 8 aa, HIV-1
LLFIHFRI

SEQ ID NO: 6375 - protein, 8 aa, HIV-1
RIGCRHSR

SEQ ID NO: 6376 - protein, 8 aa, HIV-1
HSRIGVTR

SEQ ID NO: 6377 - protein, 8 aa, HIV-1
RIGVTRQR

SEQ ID NO: 6378 - protein, 8 aa, HIV-1
VTRQRRAR

SEQ ID NO: 6379 - protein, 8 aa, HIV-1
RARNGASR

SEQ ID NO: 6380 - protein, 9 aa, HIV-1
REPHNEWTL

SEQ ID NO: 6381 - protein, 9 aa, HIV-1
PHNEWTLEL

SEQ ID NO: 6382 - protein, 9 aa, HIV-1
WTLELLEEL

SEQ ID NO: 6383 - protein, 9 aa, HIV-1
TLELLEELK

SEQ ID NO: 6384 - protein, 9 aa, HIV-1
LLEELKNEA

SEQ ID NO: 6385 - protein, 9 aa, HIV-1
NEAVRHFPR

SEQ ID NO: 6386 - protein, 9 aa, HIV-1
EAVRHFPRI

SEQ ID NO: 6387 - protein, 9 aa, HIV-1
FPRIWLHGL

SEQ ID NO: 6388 - protein, 9 aa, HIV-1
WLHGLGQHI

SEQ ID NO: 6389 - protein, 9 aa, HIV-1
GLGQHIYET

SEQ ID NO: 6390 - protein, 9 aa, HIV-1
IYETYGDTW

SEQ ID NO: 6391 - protein, 9 aa, HIV-1
YETYGDTWA

SEQ ID NO: 6392 - protein, 9 aa, HIV-1
ETYGDTWAG

SEQ ID NO: 6393 - protein, 9 aa, HIV-1
TYGDTWAGV

SEQ ID NO: 6394 - protein, 9 aa, HIV-1
DTWAGVEAI

SEQ ID NO: 6395 - protein, 9 aa, HIV-1
TWAGVEAII

SEQ ID NO: 6396 - protein, 9 aa, HIV-1
AIIRILQQL

SEQ ID NO: 6397 - protein, 9 aa, HIV-1
IRILQQLLF

SEQ ID NO: 6398 - protein, 9 aa, HIV-1
RILQQLLFI

SEQ ID NO: 6399 - protein, 9 aa, HIV-1
LQQLLFIHF

SEQ ID NO: 6400 - protein, 9 aa, HIV-1
QQLLFIHFR

SEQ ID NO: 6401 - protein, 9 aa, HIV-1
QLLFIHFRI

SEQ ID NO: 6402 - protein, 9 aa, HIV-1
FIHFRIGCR

SEQ ID NO: 6403 - protein, 9 aa, HIV-1
FRIGCRHSR

SEQ ID NO: 6404 - protein, 9 aa, HIV-1
RIGCRHSRI

SEQ ID NO: 6405 - protein, 9 aa, HIV-1
RHSRIGVTR

SEQ ID NO: 6406 - protein, 9 aa, HIV-1
SRIGVTRQR

SEQ ID NO: 6407 - protein, 9 aa, HIV-1
RIGVTRQRR

SEQ ID NO: 6408 - protein, 9 aa, HIV-1
GVTRQRRAR

SEQ ID NO: 6409 - protein, 9 aa, HIV-1
RQRRARNGA

SEQ ID NO: 6410 - protein, 9 aa, HIV-1
RRARNGASR

SEQ ID NO: 6411 - protein, 10 aa, HIV-1
QAPEDQGPQR

SEQ ID NO: 6412 - protein, 10 aa, HIV-1
EPHNEWTLEL

SEQ ID NO: 6413 - protein, 10 aa, HIV-1
WTLELLEELK

SEQ ID NO: 6414 - protein, 10 aa, HIV-1
ELLEELKNEA

SEQ ID NO: 6415 - protein, 10 aa, HIV-1
LLEELKNEAV

SEQ ID NO: 6416 - protein, 10 aa, HIV-1
ELKNEAVRHF

SEQ ID NO: 6417 - protein, 10 aa, HIV-1
KNEAVRHFPR

SEQ ID NO: 6418 - protein, 10 aa, HIV-1
EAVRHFPRIW

SEQ ID NO: 6419 - protein, 10 aa, HIV-1
AVRHFPRIWL

SEQ ID NO: 6420 - protein, 10 aa, HIV-1
HFPRIWLHGL

SEQ ID NO: 6421 - protein, 10 aa, HIV-1
FPRIWLHGLG

SEQ ID NO: 6422 - protein, 10 aa, HIV-1
IWLHGLGQHI

SEQ ID NO: 6423 - protein, 10 aa, HIV-1
WLHGLGQHIY

SEQ ID NO: 6424 - protein, 10 aa, HIV-1
GLGQHIYETY

SEQ ID NO: 6425 - protein, 10 aa, HIV-1
HIYETYGDTW

SEQ ID NO: 6426 - protein, 10 aa, HIV-1
ETYGDTWAGV

SEQ ID NO: 6427 - protein, 10 aa, HIV-1
DTWAGVEAII

SEQ ID NO: 6428 - protein, 10 aa, HIV-1
TWAGVEAIIR

SEQ ID NO: 6429 - protein, 10 aa, HIV-1
EAIIRILQQL

SEQ ID NO: 6430 - protein, 10 aa, HIV-1
AIIRILQQLL

SEQ ID NO: 6431 - protein, 10 aa, HIV-1
ILQQLLFIHF

SEQ ID NO: 6432 - protein, 10 aa, HIV-1
LQQLLFIHFR

SEQ ID NO: 6433 - protein, 10 aa, HIV-1
QQLLFIHFRI

SEQ ID NO: 6434 - protein, 10 aa, HIV-1
LLFIHFRIGC

SEQ ID NO: 6435 - protein, 10 aa, HIV-1
LFIHFRIGCR

SEQ ID NO: 6436 - protein, 10 aa, HIV-1
HFRIGCRHSR

SEQ ID NO: 6437 - protein, 10 aa, HIV-1
FRIGCRHSRI

SEQ ID NO: 6438 - protein, 10 aa, HIV-1
CRHSRIGVTR

SEQ ID NO: 6439 - protein, 10 aa, HIV-1
HSRIGVTRQR

SEQ ID NO: 6440 - protein, 10 aa, HIV-1
SRIGVTRQRR

SEQ ID NO: 6441 - protein, 10 aa, HIV-1
QRRARNGASR

SEQ ID NO: 6442 - protein, 11 aa, HIV-1
EQAPEDQGPQR

SEQ ID NO: 6443 - protein, 11 aa, HIV-1
REPHNEWTLEL

SEQ ID NO: 6444 - protein, 11 aa, HIV-1
EPHNEWTLELL

SEQ ID NO: 6445 - protein, 11 aa, HIV-1
NEWTLELLEEL

SEQ ID NO: 6446 - protein, 11 aa, HIV-1
ELLEELKNEAV

SEQ ID NO: 6447 - protein, 11 aa, HIV-1
EELKNEAVRHF

SEQ ID NO: 6448 - protein, 11 aa, HIV-1
EAVRHFPRIWL

SEQ ID NO: 6449 - protein, 11 aa, HIV-1
RHFPRIWLHGL

SEQ ID NO: 6450 - protein, 11 aa, HIV-1
RIWLHGLGQHI

SEQ ID NO: 6451 - protein, 11 aa, HIV-1
IWLHGLGQHIY

SEQ ID NO: 6452 - protein, 11 aa, HIV-1
WLHGLGQHIYE

SEQ ID NO: 6453 - protein, 11 aa, HIV-1
HIYETYGDTWA

SEQ ID NO: 6454 - protein, 11 aa, HIV-1
YETYGDTWAGV

SEQ ID NO: 6455 - protein, 11 aa, HIV-1
ETYGDTWAGVE

SEQ ID NO: 6456 - protein, 11 aa, HIV-1
DTWAGVEAIIR

SEQ ID NO: 6457 - protein, 11 aa, HIV-1
TWAGVEAIIRI

SEQ ID NO: 6458 - protein, 11 aa, HIV-1
VEAIIRILQQL

SEQ ID NO: 6459 - protein, 11 aa, HIV-1
EAIIRILQQLL

SEQ ID NO: 6460 - protein, 11 aa, HIV-1
AIIRILQQLLF

SEQ ID NO: 6461 - protein, 11 aa, HIV-1
IIRILQQLLFI

SEQ ID NO: 6462 - protein, 11 aa, HIV-1
RILQQLLFIHF

SEQ ID NO: 6463 - protein, 11 aa, HIV-1
ILQQLLFIHFR

SEQ ID NO: 6464 - protein, 11 aa, HIV-1
LQQLLFIHFRI

SEQ ID NO: 6465 - protein, 11 aa, HIV-1
QLLFIHFRIGC

SEQ ID NO: 6466 - protein, 11 aa, HIV-1
LLFIHFRIGCR

SEQ ID NO: 6467 - protein, 11 aa, HIV-1
IHFRIGCRHSR

SEQ ID NO: 6468 - protein, 11 aa, HIV-1
RIGCRHSRIGV

SEQ ID NO: 6469 - protein, 11 aa, HIV-1
GCRHSRIGVTR

SEQ ID NO: 6470 - protein, 11 aa, HIV-1
HSRIGVTRQRR

SEQ ID NO: 6471 - protein, 11 aa, HIV-1
RIGVTRQRRAR

SEQ ID NO: 6472 - protein, 11 aa, HIV-1
RQRRARNGASR

SEQ ID NO: 6473 - protein, 15 aa, HIV-1
AGVEAIIRILQQLLF

SEQ ID NO: 6474 - protein, 9 aa, HIV-1
VEAIIRILQ

SEQ ID NO: 6475 - protein, 15 aa, HIV-1
AIIRILQQLLFIHFR

SEQ ID NO: 6476 - protein, 9 aa, HIV-1
ILQQLLFIH

SEQ ID NO: 6477 - protein, 15 aa, HIV-1
AIIRILQQLLFIHFR

SEQ ID NO: 6478 - protein, 9 aa, HIV-1
IRILQQLLF

SEQ ID NO: 6479 - protein, 15 aa, HIV-1
AIIRILQQLLFIHFR

SEQ ID NO: 6480 - protein, 9 aa, HIV-1
LQQLLFIHF

SEQ ID NO: 6481 - protein, 15 aa, HIV-1
DTWAGVEAIIRILQQ

SEQ ID NO: 6482 - protein, 9 aa, HIV-1
WAGVEAIIR

SEQ ID NO: 6483 - protein, 15 aa, HIV-1
EAIIRILQQLLFIHF

SEQ ID NO: 6484 - protein, 9 aa, HIV-1
IIRILQQLL

SEQ ID NO: 6485 - protein, 15 aa, HIV-1
EAIIRILQQLLFIHF

SEQ ID NO: 6486 - protein, 9 aa, HIV-1
ILQQLLFIH

SEQ ID NO: 6487 - protein, 15 aa, HIV-1
EAIIRILQQLLFIHF

SEQ ID NO: 6488 - protein, 9 aa, HIV-1
IRILQQLLF

SEQ ID NO: 6489 - protein, 15 aa, HIV-1
EAVRHFPRIWLHGLG

SEQ ID NO: 6490 - protein, 9 aa, HIV-1
VRHFPRIWL

SEQ ID NO: 6491 - protein, 15 aa, HIV-1
EELKNEAVRHFPRIW

SEQ ID NO: 6492 - protein, 9 aa, HIV-1
LKNEAVRHF

SEQ ID NO: 6493 - protein, 15 aa, HIV-1
ELKNEAVRHFPRIWL

SEQ ID NO: 6494 - protein, 9 aa, HIV-1
LKNEAVRHF

SEQ ID NO: 6495 - protein, 15 aa, HIV-1
ELKNEAVRHFPRIWL

SEQ ID NO: 6496 - protein, 9 aa, HIV-1
NEAVRHFPR

SEQ ID NO: 6497 - protein, 15 aa, HIV-1
ELLEELKNEAVRHFP

SEQ ID NO: 6498 - protein, 9 aa, HIV-1
LKNEAVRHF

SEQ ID NO: 6499 - protein, 15 aa, HIV-1
ETYGDTWAGVEAIIR

SEQ ID NO: 6500 - protein, 9 aa, HIV-1
DTWAGVEAI

SEQ ID NO: 6501 - protein, 15 aa, HIV-1
FIHFRIGCRHSRIGV

SEQ ID NO: 6502 - protein, 9 aa, HIV-1
FIHFRIGCR

SEQ ID NO: 6503 - protein, 15 aa, HIV-1
FPRIWLHGLGQHIYE

SEQ ID NO: 6504 - protein, 9 aa, HIV-1
IWLHGLGQH

SEQ ID NO: 6505 - protein, 15 aa, HIV-1
FPRIWLHGLGQHIYE

SEQ ID NO: 6506 - protein, 9 aa, HIV-1
WLHGLGQHI

SEQ ID NO: 6507 - protein, 15 aa, HIV-1
GDTWAGVEAIIRILQ

SEQ ID NO: 6508 - protein, 9 aa, HIV-1
WAGVEAIIR

SEQ ID NO: 6509 - protein, 15 aa, HIV-1
GVEAIIRILQQLLFI

SEQ ID NO: 6510 - protein, 9 aa, HIV-1
IRILQQLLF

SEQ ID NO: 6511 - protein, 15 aa, HIV-1
HFPRIWLHGLGQHIY

SEQ ID NO: 6512 - protein, 9 aa, HIV-1
IWLHGLGQH

SEQ ID NO: 6513 - protein, 15 aa, HIV-1
HFPRIWLHGLGQHIY

SEQ ID NO: 6514 - protein, 9 aa, HIV-1
WLHGLGQHI

SEQ ID NO: 6515 - protein, 15 aa, HIV-1
IIRILQQLLFIHFRI

SEQ ID NO: 6516 - protein, 9 aa, HIV-1
ILQQLLFIH

SEQ ID NO: 6517 - protein, 15 aa, HIV-1
IIRILQQLLFIHFRI

SEQ ID NO: 6518 - protein, 9 aa, HIV-1
IRILQQLLF

SEQ ID NO: 6519 - protein, 15 aa, HIV-1
IIRILQQLLFIHFRI

SEQ ID NO: 6520 - protein, 9 aa, HIV-1
LQQLLFIHF

SEQ ID NO: 6521 - protein, 15 aa, HIV-1
ILQQLLFIHFRIGCR

SEQ ID NO: 6522 - protein, 9 aa, HIV-1
ILQQLLFIH

SEQ ID NO: 6523 - protein, 15 aa, HIV-1
ILQQLLFIHFRIGCR

SEQ ID NO: 6524 - protein, 9 aa, HIV-1
LLFIHFRIG

SEQ ID NO: 6525 - protein, 15 aa, HIV-1
IRILQQLLFIHFRIG

SEQ ID NO: 6526 - protein, 9 aa, HIV-1
ILQQLLFIH

SEQ ID NO: 6527 - protein, 15 aa, HIV-1
IRILQQLLFIHFRIG

SEQ ID NO: 6528 - protein, 9 aa, HIV-1
IRILQQLLF

SEQ ID NO: 6529 - protein, 15 aa, HIV-1
KNEAVRHFPRIWLHG

SEQ ID NO: 6530 - protein, 9 aa, HIV-1
VRHFPRIWL

SEQ ID NO: 6531 - protein, 15 aa, HIV-1
LEELKNEAVRHFPRI

SEQ ID NO: 6532 - protein, 9 aa, HIV-1
LKNEAVRHF

SEQ ID NO: 6533 - protein, 15 aa, HIV-1
LELLEELKNEAVRHF

SEQ ID NO: 6534 - protein, 9 aa, HIV-1
ELKNEAVRH

SEQ ID NO: 6535 - protein, 15 aa, HIV-1
LELLEELKNEAVRHF

SEQ ID NO: 6536 - protein, 9 aa, HIV-1
LEELKNEAV

SEQ ID NO: 6537 - protein, 15 aa, HIV-1
LFIHFRIGCRHSRIG

SEQ ID NO: 6538 - protein, 9 aa, HIV-1
FIHFRIGCR

SEQ ID NO: 6539 - protein, 15 aa, HIV-1
LKNEAVRHFPRIWLH

SEQ ID NO: 6540 - protein, 9 aa, HIV-1
LKNEAVRHF

SEQ ID NO: 6541 - protein, 15 aa, HIV-1
LKNEAVRHFPRIWLH

SEQ ID NO: 6542 - protein, 9 aa, HIV-1
VRHFPRIWL

SEQ ID NO: 6543 - protein, 15 aa, HIV-1
LLEELKNEAVRHFPR

SEQ ID NO: 6544 - protein, 9 aa, HIV-1
LKNEAVRHF

SEQ ID NO: 6545 - protein, 15 aa, HIV-1
LLFIHFRIGCRHSRI

SEQ ID NO: 6546 - protein, 9 aa, HIV-1
FIHFRIGCR

SEQ ID NO: 6547 - protein, 15 aa, HIV-1
LQQLLFIHFRIGCRH

SEQ ID NO: 6548 - protein, 9 aa, HIV-1
FIHFRIGCR

SEQ ID NO: 6549 - protein, 15 aa, HIV-1
NEAVRHFPRIWLHGL

SEQ ID NO: 6550 - protein, 9 aa, HIV-1
VRHFPRIWL

SEQ ID NO: 6551 - protein, 15 aa, HIV-1
PRIWLHGLGQHIYET

SEQ ID NO: 6552 - protein, 9 aa, HIV-1
WLHGLGQHI

SEQ ID NO: 6553 - protein, 15 aa, HIV-1
QLLFIHFRIGCRHSR

SEQ ID NO: 6554 - protein, 9 aa, HIV-1
FIHFRIGCR

SEQ ID NO: 6555 - protein, 15 aa, HIV-1
QQLLFIHFRIGCRHS

SEQ ID NO: 6556 - protein, 9 aa, HIV-1
FIHFRIGCR

SEQ ID NO: 6557 - protein, 15 aa, HIV-1
RHFPRIWLHGLGQHI

SEQ ID NO: 6558 - protein, 9 aa, HIV-1
FPRIWLHGL

SEQ ID NO: 6559 - protein, 15 aa, HIV-1
RHFPRIWLHGLGQHI

SEQ ID NO: 6560 - protein, 9 aa, HIV-1
IWLHGLGQH

SEQ ID NO: 6561 - protein, 15 aa, HIV-1
RILQQLLFIHFRIGC

SEQ ID NO: 6562 - protein, 9 aa, HIV-1
ILQQLLFIH

SEQ ID NO: 6563 - protein, 15 aa, HIV-1
RIWLHGLGQHIYETY

SEQ ID NO: 6564 - protein, 9 aa, HIV-1
WLHGLGQHI

SEQ ID NO: 6565 - protein, 15 aa, HIV-1
TYGDTWAGVEAIIRI

SEQ ID NO: 6566 - protein, 9 aa, HIV-1
WAGVEAIIR

SEQ ID NO: 6567 - protein, 15 aa, HIV-1
VEAIIRILQQLLFIH

SEQ ID NO: 6568 - protein, 9 aa, HIV-1
IRILQQLLF

SEQ ID NO: 6569 - protein, 15 aa, HIV-1
VRHFPRIWLHGLGQH

SEQ ID NO: 6570 - protein, 9 aa, HIV-1
FPRIWLHGL

SEQ ID NO: 6571 - protein, 15 aa, HIV-1
WAGVEAIIRILQQLL

SEQ ID NO: 6572 - protein, 9 aa, HIV-1
WAGVEAIIR

SEQ ID NO: 6573 - protein, 15 aa, HIV-1
YGDTWAGVEAIIRIL

SEQ ID NO: 6574 - protein, 9 aa, HIV-1
WAGVEAIIR

SEQ ID NO: 6575 - protein, 8 aa, HIV-1
RVKEKYQH

SEQ ID NO: 6576 - protein, 8 aa, HIV-1
KEKYQHLW

SEQ ID NO: 6577 - protein, 8 aa, HIV-1
EKYQHLWR

SEQ ID NO: 6578 - protein, 8 aa, HIV-1
KYQHLWRW

SEQ ID NO: 6579 - protein, 8 aa, HIV-1
HLWRWGWR

SEQ ID NO: 6580 - protein, 8 aa, HIV-1
WGWRWGTM

SEQ ID NO: 6581 - protein, 8 aa, HIV-1
WRWGTMLL

SEQ ID NO: 6582 - protein, 8 aa, HIV-1
TMLLGMLM

SEQ ID NO: 6583 - protein, 8 aa, HIV-1
MLLGMLMI

SEQ ID NO: 6584 - protein, 8 aa, HIV-1
LLGMLMIC

SEQ ID NO: 6585 - protein, 8 aa, HIV-1
GMLMICSA

SEQ ID NO: 6586 - protein, 8 aa, HIV-1
MLMICSAT

SEQ ID NO: 6587 - protein, 8 aa, HIV-1
MICSATEK

SEQ ID NO: 6588 - protein, 8 aa, HIV-1
CSATEKLW

SEQ ID NO: 6589 - protein, 8 aa, HIV-1
SATEKLWV

SEQ ID NO: 6590 - protein, 8 aa, HIV-1
EKLWVTVY

SEQ ID NO: 6591 - protein, 8 aa, HIV-1
KLWVTVYY

SEQ ID NO: 6592 - protein, 8 aa, HIV-1
WVTVYYGV

SEQ ID NO: 6593 - protein, 8 aa, HIV-1
TVYYGVPV

SEQ ID NO: 6594 - protein, 8 aa, HIV-1
VYYGVPVW

SEQ ID NO: 6595 - protein, 8 aa, HIV-1
YYGVPVWK

SEQ ID NO: 6596 - protein, 8 aa, HIV-1
VPVWKEAT

SEQ ID NO: 6597 - protein, 8 aa, HIV-1
KEATTTLF

SEQ ID NO: 6598 - protein, 8 aa, HIV-1
TTTLFCAS

SEQ ID NO: 6599 - protein, 8 aa, HIV-1
TLFCASDA

SEQ ID NO: 6600 - protein, 8 aa, HIV-1
CASDAKAY

SEQ ID NO: 6601 - protein, 8 aa, HIV-1
YDTEVHNV

SEQ ID NO: 6602 - protein, 8 aa, HIV-1
DTEVHNVW

SEQ ID NO: 6603 - protein, 8 aa, HIV-1
EVHNVWAT

SEQ ID NO: 6604 - protein, 8 aa, HIV-1
NVWATHAC

SEQ ID NO: 6605 - protein, 8 aa, HIV-1
VWATHACV

SEQ ID NO: 6606 - protein, 8 aa, HIV-1
NPQEVVLV

SEQ ID NO: 6607 - protein, 8 aa, HIV-1
QEVVLVNV

SEQ ID NO: 6608 - protein, 8 aa, HIV-1
EVVLVNVT

SEQ ID NO: 6609 - protein, 8 aa, HIV-1
NVTENFNM

SEQ ID NO: 6610 - protein, 8 aa, HIV-1
VTENFNMW

SEQ ID NO: 6611 - protein, 8 aa, HIV-1
TENFNMWK

SEQ ID NO: 6612 - protein, 8 aa, HIV-1
NMWKNDMV

SEQ ID NO: 6613 - protein, 8 aa, HIV-1
MHEDIISL

SEQ ID NO: 6614 - protein, 8 aa, HIV-1
SLWDQSLK

SEQ ID NO: 6615 - protein, 8 aa, HIV-1
QSLKPCVK

SEQ ID NO: 6616 - protein, 8 aa, HIV-1
SLKPCVKL

SEQ ID NO: 6617 - protein, 8 aa, HIV-1
KLTPLCVS

SEQ ID NO: 6618 - protein, 8 aa, HIV-1
LTPLCVSL

SEQ ID NO: 6619 - protein, 8 aa, HIV-1
TPLCVSLK

SEQ ID NO: 6620 - protein, 8 aa, HIV-1
SLKCTDLK

SEQ ID NO: 6621 - protein, 8 aa, HIV-1
NTNSSSGR

SEQ ID NO: 6622 - protein, 8 aa, HIV-1
SGRMIMEK

SEQ ID NO: 6623 - protein, 8 aa, HIV-1
MIMEKGEI

SEQ ID NO: 6624 - protein, 8 aa, HIV-1
GEIKNCSF

SEQ ID NO: 6625 - protein, 8 aa, HIV-1
FNISTSIR

SEQ ID NO: 6626 - protein, 8 aa, HIV-1
ISTSIRGK

SEQ ID NO: 6627 - protein, 8 aa, HIV-1
STSIRGKV

SEQ ID NO: 6628 - protein, 8 aa, HIV-1
SIRGKVQK

SEQ ID NO: 6629 - protein, 8 aa, HIV-1
KVQKEYAF

SEQ ID NO: 6630 - protein, 8 aa, HIV-1
VQKEYAFF

SEQ ID NO: 6631 - protein, 8 aa, HIV-1
KEYAFFYK

SEQ ID NO: 6632 - protein, 8 aa, HIV-1
EYAFFYKL

SEQ ID NO: 6633 - protein, 8 aa, HIV-1
FFYKLDII

SEQ ID NO: 6634 - protein, 8 aa, HIV-1
YKLDIIPI

SEQ ID NO: 6635 - protein, 8 aa, HIV-1
IPIDNDTT

SEQ ID NO: 6636 - protein, 8 aa, HIV-1
LTSCNTSV

SEQ ID NO: 6637 - protein, 8 aa, HIV-1
NTSVITQA

SEQ ID NO: 6638 - protein, 8 aa, HIV-1
VITQACPK

SEQ ID NO: 6639 - protein, 8 aa, HIV-1
ITQACPKV

SEQ ID NO: 6640 - protein, 8 aa, HIV-1
FEPIPIHY

SEQ ID NO: 6641 - protein, 8 aa, HIV-1
IPIHYCAP

SEQ ID NO: 6642 - protein, 8 aa, HIV-1
HYCAPAGF

SEQ ID NO: 6643 - protein, 8 aa, HIV-1
YCAPAGFA

SEQ ID NO: 6644 - protein, 8 aa, HIV-1
CAPAGFAI

SEQ ID NO: 6645 - protein, 8 aa, HIV-1
APAGFAIL

SEQ ID NO: 6646 - protein, 8 aa, HIV-1
AILKCNNK

SEQ ID NO: 6647 - protein, 8 aa, HIV-1
GTGPCTNV

SEQ ID NO: 6648 - protein, 8 aa, HIV-1
TVQCTHGI

SEQ ID NO: 6649 - protein, 8 aa, HIV-1
VQCTHGIR

SEQ ID NO: 6650 - protein, 8 aa, HIV-1
CTHGIRPV

SEQ ID NO: 6651 - protein, 8 aa, HIV-1
GIRPVVST

SEQ ID NO: 6652 - protein, 8 aa, HIV-1
RPVVSTQL

SEQ ID NO: 6653 - protein, 8 aa, HIV-1
VVSTQLLL

SEQ ID NO: 6654 - protein, 8 aa, HIV-1
QLLLNGSL

SEQ ID NO: 6655 - protein, 8 aa, HIV-1
LLLNGSLA

SEQ ID NO: 6656 - protein, 8 aa, HIV-1
SLAEEEVV

SEQ ID NO: 6657 - protein, 8 aa, HIV-1
EEVVIRSV

SEQ ID NO: 6658 - protein, 8 aa, HIV-1
VVIRSVNF

SEQ ID NO: 6659 - protein, 8 aa, HIV-1
SVNFTDNA

SEQ ID NO: 6660 - protein, 8 aa, HIV-1
FTDNAKTI

SEQ ID NO: 6661 - protein, 8 aa, HIV-1
IVQLNTSV

SEQ ID NO: 6662 - protein, 8 aa, HIV-1
QLNTSVEI

SEQ ID NO: 6663 - protein, 8 aa, HIV-1
SVEINCTR

SEQ ID NO: 6664 - protein, 8 aa, HIV-1
RKRIRIQR

SEQ ID NO: 6665 - protein, 8 aa, HIV-1
RIQRGPGR

SEQ ID NO: 6666 - protein, 8 aa, HIV-1
RGPGRAFV

SEQ ID NO: 6667 - protein, 8 aa, HIV-1
RAFVTIGK

SEQ ID NO: 6668 - protein, 8 aa, HIV-1
QAHCNISR

SEQ ID NO: 6669 - protein, 8 aa, HIV-1
RAKWNNTL

SEQ ID NO: 6670 - protein, 8 aa, HIV-1
TLKQIASK

SEQ ID NO: 6671 - protein, 8 aa, HIV-1
KQIASKLR

SEQ ID NO: 6672 - protein, 8 aa, HIV-1
NNKTIIFK

SEQ ID NO: 6673 - protein, 8 aa, HIV-1
PEIVTHSF

SEQ ID NO: 6674 - protein, 8 aa, HIV-1
SFNCGGEF

SEQ ID NO: 6675 - protein, 8 aa, HIV-1
GEFFYCNS

SEQ ID NO: 6676 - protein, 8 aa, HIV-1
FYCNSTQL

SEQ ID NO: 6677 - protein, 8 aa, HIV-1
QLFNSTWF

SEQ ID NO: 6678 - protein, 8 aa, HIV-1
STWFNSTW

SEQ ID NO: 6679 - protein, 8 aa, HIV-1
EGSDTITL

SEQ ID NO: 6680 - protein, 8 aa, HIV-1
DTITLPCR

SEQ ID NO: 6681 - protein, 8 aa, HIV-1
TITLPCRI

SEQ ID NO: 6682 - protein, 8 aa, HIV-1
ITLPCRIK

SEQ ID NO: 6683 - protein, 8 aa, HIV-1
LPCRIKQI

SEQ ID NO: 6684 - protein, 8 aa, HIV-1
RIKQIINM

SEQ ID NO: 6685 - protein, 8 aa, HIV-1
KQIINMWQ

SEQ ID NO: 6686 - protein, 8 aa, HIV-1
QIINMWQK

SEQ ID NO: 6687 - protein, 8 aa, HIV-1
IINMWQKV

SEQ ID NO: 6688 - protein, 8 aa, HIV-1
WQKVGKAM

SEQ ID NO: 6689 - protein, 8 aa, HIV-1
KVGKAMYA

SEQ ID NO: 6690 - protein, 8 aa, HIV-1
KAMYAPPI

SEQ ID NO: 6691 - protein, 8 aa, HIV-1
APPISGQI

SEQ ID NO: 6692 - protein, 8 aa, HIV-1
QIRCSSNI

SEQ ID NO: 6693 - protein, 8 aa, HIV-1
CSSNITGL

SEQ ID NO: 6694 - protein, 8 aa, HIV-1
ITGLLLTR

SEQ ID NO: 6695 - protein, 8 aa, HIV-1
NNESEIFR

SEQ ID NO: 6696 - protein, 8 aa, HIV-1
WRSELYKY

SEQ ID NO: 6697 - protein, 8 aa, HIV-1
RSELYKYK

SEQ ID NO: 6698 - protein, 8 aa, HIV-1
ELYKYKVV

SEQ ID NO: 6699 - protein, 8 aa, HIV-1
LYKYKVVK

SEQ ID NO: 6700 - protein, 8 aa, HIV-1
KVVKIEPL

SEQ ID NO: 6701 - protein, 8 aa, HIV-1
EPLGVAPT

SEQ ID NO: 6702 - protein, 8 aa, HIV-1
GVAPTKAK

SEQ ID NO: 6703 - protein, 8 aa, HIV-1
RRVVQREK

SEQ ID NO: 6704 - protein, 8 aa, HIV-1
RVVQREKR

SEQ ID NO: 6705 - protein, 8 aa, HIV-1
REKRAVGI

SEQ ID NO: 6706 - protein, 8 aa, HIV-1
RAVGIGAL

SEQ ID NO: 6707 - protein, 8 aa, HIV-1
FLGFLGAA

SEQ ID NO: 6708 - protein, 8 aa, HIV-1
FLGAAGST

SEQ ID NO: 6709 - protein, 8 aa, HIV-1
STMGAASM

SEQ ID NO: 6710 - protein, 8 aa, HIV-1
MGAASMTL

SEQ ID NO: 6711 - protein, 8 aa, HIV-1
AASMTLTV

SEQ ID NO: 6712 - protein, 8 aa, HIV-1
SMTLTVQA

SEQ ID NO: 6713 - protein, 8 aa, HIV-1
MTLTVQAR

SEQ ID NO: 6714 - protein, 8 aa, HIV-1
TVQARQLL

SEQ ID NO: 6715 - protein, 8 aa, HIV-1
RQLLSGIV

SEQ ID NO: 6716 - protein, 8 aa, HIV-1
QLLSGIVQ

SEQ ID NO: 6717 - protein, 8 aa, HIV-1
LLSGIVQQ

SEQ ID NO: 6718 - protein, 8 aa, HIV-1
VQQQNNLL

SEQ ID NO: 6719 - protein, 8 aa, HIV-1
QQQNNLLR

SEQ ID NO: 6720 - protein, 8 aa, HIV-1
QQNNLLRA

SEQ ID NO: 6721 - protein, 8 aa, HIV-1
NLLRAIEA

SEQ ID NO: 6722 - protein, 8 aa, HIV-1
LLRAIEAQ

SEQ ID NO: 6723 - protein, 8 aa, HIV-1
AIEAQQHL

SEQ ID NO: 6724 - protein, 8 aa, HIV-1
IEAQQHLL

SEQ ID NO: 6725 - protein, 8 aa, HIV-1
AQQHLLQL

SEQ ID NO: 6726 - protein, 8 aa, HIV-1
HLLQLTVW

SEQ ID NO: 6727 - protein, 8 aa, HIV-1
LQLTVWGI

SEQ ID NO: 6728 - protein, 8 aa, HIV-1
QLTVWGIK

SEQ ID NO: 6729 - protein, 8 aa, HIV-1
TVWGIKQL

SEQ ID NO: 6730 - protein, 8 aa, HIV-1
GIKQLQAR

SEQ ID NO: 6731 - protein, 8 aa, HIV-1
KQLQARIL

SEQ ID NO: 6732 - protein, 8 aa, HIV-1
QLQARILA

SEQ ID NO: 6733 - protein, 8 aa, HIV-1
LQARILAV

SEQ ID NO: 6734 - protein, 8 aa, HIV-1
ILAVERYL

SEQ ID NO: 6735 - protein, 8 aa, HIV-1
LAVERYLK

SEQ ID NO: 6736 - protein, 8 aa, HIV-1
RYLKDQQL

SEQ ID NO: 6737 - protein, 8 aa, HIV-1
YLKDQQLL

SEQ ID NO: 6738 - protein, 8 aa, HIV-1
QLLGIWGC

SEQ ID NO: 6739 - protein, 8 aa, HIV-1
GIWGCSGK

SEQ ID NO: 6740 - protein, 8 aa, HIV-1
KLICTTAV

SEQ ID NO: 6741 - protein, 8 aa, HIV-1
TTAVPWNA

SEQ ID NO: 6742 - protein, 8 aa, HIV-1
AVPWNASW

SEQ ID NO: 6743 - protein, 8 aa, HIV-1
VPWNASWS

SEQ ID NO: 6744 - protein, 8 aa, HIV-1
QIWNHTTW

SEQ ID NO: 6745 - protein, 8 aa, HIV-1
TTWMEWDR

SEQ ID NO: 6746 - protein, 8 aa, HIV-1
WMEWDREI

SEQ ID NO: 6747 - protein, 8 aa, HIV-1
WDREINNY

SEQ ID NO: 6748 - protein, 8 aa, HIV-1
EINNYTSL

SEQ ID NO: 6749 - protein, 8 aa, HIV-1
YTSLIHSL

SEQ ID NO: 6750 - protein, 8 aa, HIV-1
ESQNQQEK

SEQ ID NO: 6751 - protein, 8 aa, HIV-1
QEKNEQEL

SEQ ID NO: 6752 - protein, 8 aa, HIV-1
NEQELLEL

SEQ ID NO: 6753 - protein, 8 aa, HIV-1
LLELDKWA

SEQ ID NO: 6754 - protein, 8 aa, HIV-1
ELDKWASL

SEQ ID NO: 6755 - protein, 8 aa, HIV-1
KWASLWNW

SEQ ID NO: 6756 - protein, 8 aa, HIV-1
WASLWNWF

SEQ ID NO: 6757 - protein, 8 aa, HIV-1
SLWNWFNI

SEQ ID NO: 6758 - protein, 8 aa, HIV-1
NWFNITNW

SEQ ID NO: 6759 - protein, 8 aa, HIV-1
WFNITNWL

SEQ ID NO: 6760 - protein, 8 aa, HIV-1
FNITNWLW

SEQ ID NO: 6761 - protein, 8 aa, HIV-1
NITNWLWY

SEQ ID NO: 6762 - protein, 8 aa, HIV-1
ITNWLWYI

SEQ ID NO: 6763 - protein, 8 aa, HIV-1
NWLWYIKL

SEQ ID NO: 6764 - protein, 8 aa, HIV-1
WLWYIKLF

SEQ ID NO: 6765 - protein, 8 aa, HIV-1
LWYIKLFI

SEQ ID NO: 6766 - protein, 8 aa, HIV-1
WYIKLFIM

SEQ ID NO: 6767 - protein, 8 aa, HIV-1
YIKLFIMI

SEQ ID NO: 6768 - protein, 8 aa, HIV-1
FIMIVGGL

SEQ ID NO: 6769 - protein, 8 aa, HIV-1
IMIVGGLV

SEQ ID NO: 6770 - protein, 8 aa, HIV-1
IVGGLVGL

SEQ ID NO: 6771 - protein, 8 aa, HIV-1
GLVGLRIV

SEQ ID NO: 6772 - protein, 8 aa, HIV-1
GLRIVFAV

SEQ ID NO: 6773 - protein, 8 aa, HIV-1
IVFAVLSI

SEQ ID NO: 6774 - protein, 8 aa, HIV-1
AVLSIVNR

SEQ ID NO: 6775 - protein, 8 aa, HIV-1
VLSIVNRV

SEQ ID NO: 6776 - protein, 8 aa, HIV-1
LSIVNRVR

SEQ ID NO: 6777 - protein, 8 aa, HIV-1
VRQGYSPL

SEQ ID NO: 6778 - protein, 8 aa, HIV-1
SPLSFQTH

SEQ ID NO: 6779 - protein, 8 aa, HIV-1
PLSFQTHL

SEQ ID NO: 6780 - protein, 8 aa, HIV-1
FQTHLPTP

SEQ ID NO: 6781 - protein, 8 aa, HIV-1
QTHLPTPR

SEQ ID NO: 6782 - protein, 8 aa, HIV-1
LPTPRGPD

SEQ ID NO: 6783 - protein, 8 aa, HIV-1
RDRDRSIR

SEQ ID NO: 6784 - protein, 8 aa, HIV-1
RLVNGSLA

SEQ ID NO: 6785 - protein, 8 aa, HIV-1
LVNGSLAL

SEQ ID NO: 6786 - protein, 8 aa, HIV-1
ALIWDDLR

SEQ ID NO: 6787 - protein, 8 aa, HIV-1
RSLCLFSY

SEQ ID NO: 6788 - protein, 8 aa, HIV-1
LCLFSYHR

SEQ ID NO: 6789 - protein, 8 aa, HIV-1
CLFSYHRL

SEQ ID NO: 6790 - protein, 8 aa, HIV-1
LFSYHRLR

SEQ ID NO: 6791 - protein, 8 aa, HIV-1
SYHRLRDL

SEQ ID NO: 6792 - protein, 8 aa, HIV-1
RLRDLLLI

SEQ ID NO: 6793 - protein, 8 aa, HIV-1
DLLLIVTR

SEQ ID NO: 6794 - protein, 8 aa, HIV-1
LLLIVTRI

SEQ ID NO: 6795 - protein, 8 aa, HIV-1
LLIVTRIV

SEQ ID NO: 6796 - protein, 8 aa, HIV-1
IVTRIVEL

SEQ ID NO: 6797 - protein, 8 aa, HIV-1
RIVELLGR

SEQ ID NO: 6798 - protein, 8 aa, HIV-1
IVELLGRR

SEQ ID NO: 6799 - protein, 8 aa, HIV-1
GRRGWEAL

SEQ ID NO: 6800 - protein, 8 aa, HIV-1
RRGWEALK

SEQ ID NO: 6801 - protein, 8 aa, HIV-1
WEALKYWW

SEQ ID NO: 6802 - protein, 8 aa, HIV-1
ALKYWWNL

SEQ ID NO: 6803 - protein, 8 aa, HIV-1
YWWNLLQY

SEQ ID NO: 6804 - protein, 8 aa, HIV-1
NLLQYWSQ

SEQ ID NO: 6805 - protein, 8 aa, HIV-1
LQYWSQEL

SEQ ID NO: 6806 - protein, 8 aa, HIV-1
QYWSQELK

SEQ ID NO: 6807 - protein, 8 aa, HIV-1
SLLNATAI

SEQ ID NO: 6808 - protein, 8 aa, HIV-1
LLNATAIA

SEQ ID NO: 6809 - protein, 8 aa, HIV-1
NATAIAVA

SEQ ID NO: 6810 - protein, 8 aa, HIV-1
AVAEGTDR

SEQ ID NO: 6811 - protein, 8 aa, HIV-1
AEGTDRVI

SEQ ID NO: 6812 - protein, 8 aa, HIV-1
GTDRVIEV

SEQ ID NO: 6813 - protein, 8 aa, HIV-1
EVVQGACR

SEQ ID NO: 6814 - protein, 8 aa, HIV-1
RAIRHIPR

SEQ ID NO: 6815 - protein, 8 aa, HIV-1
AIRHIPRR

SEQ ID NO: 6816 - protein, 8 aa, HIV-1
RHIPRRIR

SEQ ID NO: 6817 - protein, 8 aa, HIV-1
IPRRIRQG

SEQ ID NO: 6818 - protein, 8 aa, HIV-1
RIRQGLER

SEQ ID NO: 6819 - protein, 9 aa, HIV-1
RVKEKYQHL

SEQ ID NO: 6820 - protein, 9 aa, HIV-1
KEKYQHLWR

SEQ ID NO: 6821 - protein, 9 aa, HIV-1
YQHLWRWGW

SEQ ID NO: 6822 - protein, 9 aa, HIV-1
HLWRWGWRW

SEQ ID NO: 6823 - protein, 9 aa, HIV-1
WRWGWRWGT

SEQ ID NO: 6824 - protein, 9 aa, HIV-1
WGWRWGTML

SEQ ID NO: 6825 - protein, 9 aa, HIV-1
GWRWGTMLL

SEQ ID NO: 6826 - protein, 9 aa, HIV-1
TMLLGMLMI

SEQ ID NO: 6827 - protein, 9 aa, HIV-1
MLLGMLMIC

SEQ ID NO: 6828 - protein, 9 aa, HIV-1
LGMLMICSA

SEQ ID NO: 6829 - protein, 9 aa, HIV-1
LMICSATEK

SEQ ID NO: 6830 - protein, 9 aa, HIV-1
MICSATEKL

SEQ ID NO: 6831 - protein, 9 aa, HIV-1
ICSATEKLW

SEQ ID NO: 6832 - protein, 9 aa, HIV-1
ATEKLWVTV

SEQ ID NO: 6833 - protein, 9 aa, HIV-1
TEKLWVTVY

SEQ ID NO: 6834 - protein, 9 aa, HIV-1
EKLWVTVYY

SEQ ID NO: 6835 - protein, 9 aa, HIV-1
KLWVTVYYG

SEQ ID NO: 6836 - protein, 9 aa, HIV-1
LWVTVYYGV

SEQ ID NO: 6837 - protein, 9 aa, HIV-1
VTVYYGVPV

SEQ ID NO: 6838 - protein, 9 aa, HIV-1
TVYYGVPVW

SEQ ID NO: 6839 - protein, 9 aa, HIV-1
VYYGVPVWK

SEQ ID NO: 6840 - protein, 9 aa, HIV-1
VPVWKEATT

SEQ ID NO: 6841 - protein, 9 aa, HIV-1
VWKEATTTL

SEQ ID NO: 6842 - protein, 9 aa, HIV-1
EATTTLFCA

SEQ ID NO: 6843 - protein, 9 aa, HIV-1
TLFCASDAK

SEQ ID NO: 6844 - protein, 9 aa, HIV-1
FCASDAKAY

SEQ ID NO: 6845 - protein, 9 aa, HIV-1
AYDTEVHNV

SEQ ID NO: 6846 - protein, 9 aa, HIV-1
TEVHNVWAT

SEQ ID NO: 6847 - protein, 9 aa, HIV-1
EVHNVWATH

SEQ ID NO: 6848 - protein, 9 aa, HIV-1
NVWATHACV

SEQ ID NO: 6849 - protein, 9 aa, HIV-1
PTDPNPQEV

SEQ ID NO: 6850 - protein, 9 aa, HIV-1
DPNPQEVVL

SEQ ID NO: 6851 - protein, 9 aa, HIV-1
VLVNVTENF

SEQ ID NO: 6852 - protein, 9 aa, HIV-1
VTENFNMWK

SEQ ID NO: 6853 - protein, 9 aa, HIV-1
FNMWKNDMV

SEQ ID NO: 6854 - protein, 9 aa, HIV-1
QMHEDIISL

SEQ ID NO: 6855 - protein, 9 aa, HIV-1
IISLWDQSL

SEQ ID NO: 6856 - protein, 9 aa, HIV-1
ISLWDQSLK

SEQ ID NO: 6857 - protein, 9 aa, HIV-1
SLWDQSLKP

SEQ ID NO: 6858 - protein, 9 aa, HIV-1
SLKPCVKLT

SEQ ID NO: 6859 - protein, 9 aa, HIV-1
KPCVKLTPL

SEQ ID NO: 6860 - protein, 9 aa, HIV-1
KLTPLCVSL

SEQ ID NO: 6861 - protein, 9 aa, HIV-1
LTPLCVSLK

SEQ ID NO: 6862 - protein, 9 aa, HIV-1
VSLKCTDLK

SEQ ID NO: 6863 - protein, 9 aa, HIV-1
TNTNSSSGR

SEQ ID NO: 6864 - protein, 9 aa, HIV-1
NTNSSSGRM

SEQ ID NO: 6865 - protein, 9 aa, HIV-1
SSGRMIMEK

SEQ ID NO: 6866 - protein, 9 aa, HIV-1
RMIMEKGEI

SEQ ID NO: 6867 - protein, 9 aa, HIV-1
MIMEKGEIK

SEQ ID NO: 6868 - protein, 9 aa, HIV-1
EIKNCSFNI

SEQ ID NO: 6869 - protein, 9 aa, HIV-1
CSFNISTSI

SEQ ID NO: 6870 - protein, 9 aa, HIV-1
SFNISTSIR

SEQ ID NO: 6871 - protein, 9 aa, HIV-1
NISTSIRGK

SEQ ID NO: 6872 - protein, 9 aa, HIV-1
ISTSIRGKV

SEQ ID NO: 6873 - protein, 9 aa, HIV-1
TSIRGKVQK

SEQ ID NO: 6874 - protein, 9 aa, HIV-1
KVQKEYAFF

SEQ ID NO: 6875 - protein, 9 aa, HIV-1
VQKEYAFFY

SEQ ID NO: 6876 - protein, 9 aa, HIV-1
KEYAFFYKL

SEQ ID NO: 6877 - protein, 9 aa, HIV-1
AFFYKLDII

SEQ ID NO: 6878 - protein, 9 aa, HIV-1
FYKLDIIPI

SEQ ID NO: 6879 - protein, 9 aa, HIV-1
IPIDNDTTS

SEQ ID NO: 6880 - protein, 9 aa, HIV-1
PIDNDTTSY

SEQ ID NO: 6881 - protein, 9 aa, HIV-1
KLTSCNTSV

SEQ ID NO: 6882 - protein, 9 aa, HIV-1
LTSCNTSVI

SEQ ID NO: 6883 - protein, 9 aa, HIV-1
NTSVITQAC

SEQ ID NO: 6884 - protein, 9 aa, HIV-1
SVITQACPK

SEQ ID NO: 6885 - protein, 9 aa, HIV-1
VITQACPKV

SEQ ID NO: 6886 - protein, 9 aa, HIV-1
TQACPKVSF

SEQ ID NO: 6887 - protein, 9 aa, HIV-1
CPKVSFEPI

SEQ ID NO: 6888 - protein, 9 aa, HIV-1
KVSFEPIPI

SEQ ID NO: 6889 - protein, 9 aa, HIV-1
SFEPIPIHY

SEQ ID NO: 6890 - protein, 9 aa, HIV-1
EPIPIHYCA

SEQ ID NO: 6891 - protein, 9 aa, HIV-1
IPIHYCAPA

SEQ ID NO: 6892 - protein, 9 aa, HIV-1
YCAPAGFAI

SEQ ID NO: 6893 - protein, 9 aa, HIV-1
CAPAGFAIL

SEQ ID NO: 6894 - protein, 9 aa, HIV-1
APAGFAILK

SEQ ID NO: 6895 - protein, 9 aa, HIV-1
FAILKCNNK

SEQ ID NO: 6896 - protein, 9 aa, HIV-1
ILKCNNKTF

SEQ ID NO: 6897 - protein, 9 aa, HIV-1
NGTGPCTNV

SEQ ID NO: 6898 - protein, 9 aa, HIV-1
STVQCTHGI

SEQ ID NO: 6899 - protein, 9 aa, HIV-1
TVQCTHGIR

SEQ ID NO: 6900 - protein, 9 aa, HIV-1
CTHGIRPVV

SEQ ID NO: 6901 - protein, 9 aa, HIV-1
RPVVSTQLL

SEQ ID NO: 6902 - protein, 9 aa, HIV-1
TQLLLNGSL

SEQ ID NO: 6903 - protein, 9 aa, HIV-1
QLLLNGSLA

SEQ ID NO: 6904 - protein, 9 aa, HIV-1
LLLNGSLAE

SEQ ID NO: 6905 - protein, 9 aa, HIV-1
LLNGSLAEE

SEQ ID NO: 6906 - protein, 9 aa, HIV-1
SLAEEEVVI

SEQ ID NO: 6907 - protein, 9 aa, HIV-1
EVVIRSVNF

SEQ ID NO: 6908 - protein, 9 aa, HIV-1
SVNFTDNAK

SEQ ID NO: 6909 - protein, 9 aa, HIV-1
NAKTIIVQL

SEQ ID NO: 6910 - protein, 9 aa, HIV-1
IIVQLNTSV

SEQ ID NO: 6911 - protein, 9 aa, HIV-1
VQLNTSVEI

SEQ ID NO: 6912 - protein, 9 aa, HIV-1
TSVEINCTR

SEQ ID NO: 6913 - protein, 9 aa, HIV-1
CTRPNNNTR

SEQ ID NO: 6914 - protein, 9 aa, HIV-1
RPNNNTRKR

SEQ ID NO: 6915 - protein, 9 aa, HIV-1
IQRGPGRAF

SEQ ID NO: 6916 - protein, 9 aa, HIV-1
QRGPGRAFV

SEQ ID NO: 6917 - protein, 9 aa, HIV-1
GPGRAFVTI

SEQ ID NO: 6918 - protein, 9 aa, HIV-1
GRAFVTIGK

SEQ ID NO: 6919 - protein, 9 aa, HIV-1
VTIGKIGNM

SEQ ID NO: 6920 - protein, 9 aa, HIV-1
TIGKIGNMR

SEQ ID NO: 6921 - protein, 9 aa, HIV-1
NMRQAHCNI

SEQ ID NO: 6922 - protein, 9 aa, HIV-1
RQAHCNISR

SEQ ID NO: 6923 - protein, 9 aa, HIV-1
QAHCNISRA

SEQ ID NO: 6924 - protein, 9 aa, HIV-1
HCNISRAKW

SEQ ID NO: 6925 - protein, 9 aa, HIV-1
SRAKWNNTL

SEQ ID NO: 6926 - protein, 9 aa, HIV-1
RAKWNNTLK

SEQ ID NO: 6927 - protein, 9 aa, HIV-1
NTLKQIASK

SEQ ID NO: 6928 - protein, 9 aa, HIV-1
TLKQIASKL

SEQ ID NO: 6929 - protein, 9 aa, HIV-1
IASKLREQF

SEQ ID NO: 6930 - protein, 9 aa, HIV-1
GNNKTIIFK

SEQ ID NO: 6931 - protein, 9 aa, HIV-1
KQSSGGDPE

SEQ ID NO: 6932 - protein, 9 aa, HIV-1
DPEIVTHSF

SEQ ID NO: 6933 - protein, 9 aa, HIV-1
HSFNCGGEF

SEQ ID NO: 6934 - protein, 9 aa, HIV-1
SFNCGGEFF

SEQ ID NO: 6935 - protein, 9 aa, HIV-1
FNCGGEFFY

SEQ ID NO: 6936 - protein, 9 aa, HIV-1
GEFFYCNST

SEQ ID NO: 6937 - protein, 9 aa, HIV-1
FFYCNSTQL

SEQ ID NO: 6938 - protein, 9 aa, HIV-1
FYCNSTQLF

SEQ ID NO: 6939 - protein, 9 aa, HIV-1
STQLFNSTW

SEQ ID NO: 6940 - protein, 9 aa, HIV-1
TQLFNSTWF

SEQ ID NO: 6941 - protein, 9 aa, HIV-1
QLFNSTWFN

SEQ ID NO: 6942 - protein, 9 aa, HIV-1
NSTWFNSTW

SEQ ID NO: 6943 - protein, 9 aa, HIV-1
TEGSDTITL

SEQ ID NO: 6944 - protein, 9 aa, HIV-1
DTITLPCRI

SEQ ID NO: 6945 - protein, 9 aa, HIV-1
TITLPCRIK

SEQ ID NO: 6946 - protein, 9 aa, HIV-1
TLPCRIKQI

SEQ ID NO: 6947 - protein, 9 aa, HIV-1
LPCRIKQII

SEQ ID NO: 6948 - protein, 9 aa, HIV-1
KQIINMWQK

SEQ ID NO: 6949 - protein, 9 aa, HIV-1
QIINMWQKV

SEQ ID NO: 6950 - protein, 9 aa, HIV-1
NMWQKVGKA

SEQ ID NO: 6951 - protein, 9 aa, HIV-1
MWQKVGKAM

SEQ ID NO: 6952 - protein, 9 aa, HIV-1
WQKVGKAMY

SEQ ID NO: 6953 - protein, 9 aa, HIV-1
YAPPISGQI

SEQ ID NO: 6954 - protein, 9 aa, HIV-1
GQIRCSSNI

SEQ ID NO: 6955 - protein, 9 aa, HIV-1
RCSSNITGL

SEQ ID NO: 6956 - protein, 9 aa, HIV-1
CSSNITGLL

SEQ ID NO: 6957 - protein, 9 aa, HIV-1
NITGLLLTR

SEQ ID NO: 6958 - protein, 9 aa, HIV-1
NSNNESEIF

SEQ ID NO: 6959 - protein, 9 aa, HIV-1
SNNESEIFR

SEQ ID NO: 6960 - protein, 9 aa, HIV-1
MRDNWRSEL

SEQ ID NO: 6961 - protein, 9 aa, HIV-1
NWRSELYKY

SEQ ID NO: 6962 - protein, 9 aa, HIV-1
WRSELYKYK

SEQ ID NO: 6963 - protein, 9 aa, HIV-1
ELYKYKVVK

SEQ ID NO: 6964 - protein, 9 aa, HIV-1
LYKYKVVKI

SEQ ID NO: 6965 - protein, 9 aa, HIV-1
VVKIEPLGV

SEQ ID NO: 6966 - protein, 9 aa, HIV-1
EPLGVAPTK

SEQ ID NO: 6967 - protein, 9 aa, HIV-1
GVAPTKAKR

SEQ ID NO: 6968 - protein, 9 aa, HIV-1
APTKAKRRV

SEQ ID NO: 6969 - protein, 9 aa, HIV-1
KAKRRVVQR

SEQ ID NO: 6970 - protein, 9 aa, HIV-1
KRRVVQREK

SEQ ID NO: 6971 - protein, 9 aa, HIV-1
RRVVQREKR

SEQ ID NO: 6972 - protein, 9 aa, HIV-1
VVQREKRAV

SEQ ID NO: 6973 - protein, 9 aa, HIV-1
RAVGIGALF

SEQ ID NO: 6974 - protein, 9 aa, HIV-1
AVGIGALFL

SEQ ID NO: 6975 - protein, 9 aa, HIV-1
IGALFLGFL

SEQ ID NO: 6976 - protein, 9 aa, HIV-1
ALFLGFLGA

SEQ ID NO: 6977 - protein, 9 aa, HIV-1
FLGAAGSTM

SEQ ID NO: 6978 - protein, 9 aa, HIV-1
GAAGSTMGA

SEQ ID NO: 6979 - protein, 9 aa, HIV-1
STMGAASMT

SEQ ID NO: 6980 - protein, 9 aa, HIV-1
TMGAASMTL

SEQ ID NO: 6981 - protein, 9 aa, HIV-1
MGAASMTLT

SEQ ID NO: 6982 - protein, 9 aa, HIV-1
GAASMTLTV

SEQ ID NO: 6983 - protein, 9 aa, HIV-1
SMTLTVQAR

SEQ ID NO: 6984 - protein, 9 aa, HIV-1
TLTVQARQL

SEQ ID NO: 6985 - protein, 9 aa, HIV-1
LTVQARQLL

SEQ ID NO: 6986 - protein, 9 aa, HIV-1
QARQLLSGI

SEQ ID NO: 6987 - protein, 9 aa, HIV-1
QLLSGIVQQ

SEQ ID NO: 6988 - protein, 9 aa, HIV-1
LLSGIVQQQ

SEQ ID NO: 6989 - protein, 9 aa, HIV-1
GIVQQQNNL

SEQ ID NO: 6990 - protein, 9 aa, HIV-1
VQQQNNLLR

SEQ ID NO: 6991 - protein, 9 aa, HIV-1
QQQNNLLRA

SEQ ID NO: 6992 - protein, 9 aa, HIV-1
QQNNLLRAI

SEQ ID NO: 6993 - protein, 9 aa, HIV-1
NLLRAIEAQ

SEQ ID NO: 6994 - protein, 9 aa, HIV-1
RAIEAQQHL

SEQ ID NO: 6995 - protein, 9 aa, HIV-1
AIEAQQHLL

SEQ ID NO: 6996 - protein, 9 aa, HIV-1
EAQQHLLQL

SEQ ID NO: 6997 - protein, 9 aa, HIV-1
AQQHLLQLT

SEQ ID NO: 6998 - protein, 9 aa, HIV-1
QQHLLQLTV

SEQ ID NO: 6999 - protein, 9 aa, HIV-1
HLLQLTVWG

SEQ ID NO: 7000 - protein, 9 aa, HIV-1
LLQLTVWGI

SEQ ID NO: 7001 - protein, 9 aa, HIV-1
LQLTVWGIK

SEQ ID NO: 7002 - protein, 9 aa, HIV-1
LTVWGIKQL

SEQ ID NO: 7003 - protein, 9 aa, HIV-1
TVWGIKQLQ

SEQ ID NO: 7004 - protein, 9 aa, HIV-1
GIKQLQARI

SEQ ID NO: 7005 - protein, 9 aa, HIV-1
KQLQARILA

SEQ ID NO: 7006 - protein, 9 aa, HIV-1
QLQARILAV

SEQ ID NO: 7007 - protein, 9 aa, HIV-1
QARILAVER

SEQ ID NO: 7008 - protein, 9 aa, HIV-1
RILAVERYL

SEQ ID NO: 7009 - protein, 9 aa, HIV-1
ILAVERYLK

SEQ ID NO: 7010 - protein, 9 aa, HIV-1
RYLKDQQLL

SEQ ID NO: 7011 - protein, 9 aa, HIV-1
YLKDQQLLG

SEQ ID NO: 7012 - protein, 9 aa, HIV-1
QQLLGIWGC

SEQ ID NO: 7013 - protein, 9 aa, HIV-1
GIWGCSGKL

SEQ ID NO: 7014 - protein, 9 aa, HIV-1
IWGCSGKLI

SEQ ID NO: 7015 - protein, 9 aa, HIV-1
CTTAVPWNA

SEQ ID NO: 7016 - protein, 9 aa, HIV-1
TTAVPWNAS

SEQ ID NO: 7017 - protein, 9 aa, HIV-1
TAVPWNASW

SEQ ID NO: 7018 - protein, 9 aa, HIV-1
VPWNASWSN

SEQ ID NO: 7019 - protein, 9 aa, HIV-1
KSLEQIWNH

SEQ ID NO: 7020 - protein, 9 aa, HIV-1
QIWNHTTWM

SEQ ID NO: 7021 - protein, 9 aa, HIV-1
HTTWMEWDR

SEQ ID NO: 7022 - protein, 9 aa, HIV-1
TWMEWDREI

SEQ ID NO: 7023 - protein, 9 aa, HIV-1
REINNYTSL

SEQ ID NO: 7024 - protein, 9 aa, HIV-1
EINNYTSLI

SEQ ID NO: 7025 - protein, 9 aa, HIV-1
NYTSLIHSL

SEQ ID NO: 7026 - protein, 9 aa, HIV-1
YTSLIHSLI

SEQ ID NO: 7027 - protein, 9 aa, HIV-1
SLIEESQNQ

SEQ ID NO: 7028 - protein, 9 aa, HIV-1
QEKNEQELL

SEQ ID NO: 7029 - protein, 9 aa, HIV-1
ELLELDKWA

SEQ ID NO: 7030 - protein, 9 aa, HIV-1
LELDKWASL

SEQ ID NO: 7031 - protein, 9 aa, HIV-1
KWASLWNWF

SEQ ID NO: 7032 - protein, 9 aa, HIV-1
SLWNWFNIT

SEQ ID NO: 7033 - protein, 9 aa, HIV-1
NWFNITNWL

SEQ ID NO: 7034 - protein, 9 aa, HIV-1
WFNITNWLW

SEQ ID NO: 7035 - protein, 9 aa, HIV-1
FNITNWLWY

SEQ ID NO: 7036 - protein, 9 aa, HIV-1
NITNWLWYI

SEQ ID NO: 7037 - protein, 9 aa, HIV-1
ITNWLWYIK

SEQ ID NO: 7038 - protein, 9 aa, HIV-1
NWLWYIKLF

SEQ ID NO: 7039 - protein, 9 aa, HIV-1
WLWYIKLFI

SEQ ID NO: 7040 - protein, 9 aa, HIV-1
WYIKLFIMI

SEQ ID NO: 7041 - protein, 9 aa, HIV-1
YIKLFIMIV

SEQ ID NO: 7042 - protein, 9 aa, HIV-1
FIMIVGGLV

SEQ ID NO: 7043 - protein, 9 aa, HIV-1
MIVGGLVGL

SEQ ID NO: 7044 - protein, 9 aa, HIV-1
IVGGLVGLR

SEQ ID NO: 7045 - protein, 9 aa, HIV-1
GLVGLRIVF

SEQ ID NO: 7046 - protein, 9 aa, HIV-1
LVGLRIVFA

SEQ ID NO: 7047 - protein, 9 aa, HIV-1
VGLRIVFAV

SEQ ID NO: 7048 - protein, 9 aa, HIV-1
GLRIVFAVL

SEQ ID NO: 7049 - protein, 9 aa, HIV-1
RIVFAVLSI

SEQ ID NO: 7050 - protein, 9 aa, HIV-1
IVFAVLSIV

SEQ ID NO: 7051 - protein, 9 aa, HIV-1
FAVLSIVNR

SEQ ID NO: 7052 - protein, 9 aa, HIV-1
AVLSIVNRV

SEQ ID NO: 7053 - protein, 9 aa, HIV-1
VLSIVNRVR

SEQ ID NO: 7054 - protein, 9 aa, HIV-1
IVNRVRQGY

SEQ ID NO: 7055 - protein, 9 aa, HIV-1
RVRQGYSPL

SEQ ID NO: 7056 - protein, 9 aa, HIV-1
RQGYSPLSF

SEQ ID NO: 7057 - protein, 9 aa, HIV-1
SPLSFQTHL

SEQ ID NO: 7058 - protein, 9 aa, HIV-1
FQTHLPTPR

SEQ ID NO: 7059 - protein, 9 aa, HIV-1
RDRDRSIRL

SEQ ID NO: 7060 - protein, 9 aa, HIV-1
SIRLVNGSL

SEQ ID NO: 7061 - protein, 9 aa, HIV-1
RLVNGSLAL

SEQ ID NO: 7062 - protein, 9 aa, HIV-1
LVNGSLALI

SEQ ID NO: 7063 - protein, 9 aa, HIV-1
SLALIWDDL

SEQ ID NO: 7064 - protein, 9 aa, HIV-1
LALIWDDLR

SEQ ID NO: 7065 - protein, 9 aa, HIV-1
LIWDDLRSL

SEQ ID NO: 7066 - protein, 9 aa, HIV-1
RSLCLFSYH

SEQ ID NO: 7067 - protein, 9 aa, HIV-1
SLCLFSYHR

SEQ ID NO: 7068 - protein, 9 aa, HIV-1
CLFSYHRLR

SEQ ID NO: 7069 - protein, 9 aa, HIV-1
SYHRLRDLL

SEQ ID NO: 7070 - protein, 9 aa, HIV-1
YHRLRDLLL

SEQ ID NO: 7071 - protein, 9 aa, HIV-1
RLRDLLLIV

SEQ ID NO: 7072 - protein, 9 aa, HIV-1
RDLLLIVTR

SEQ ID NO: 7073 - protein, 9 aa, HIV-1
DLLLIVTRI

SEQ ID NO: 7074 - protein, 9 aa, HIV-1
LLLIVTRIV

SEQ ID NO: 7075 - protein, 9 aa, HIV-1
LIVTRIVEL

SEQ ID NO: 7076 - protein, 9 aa, HIV-1
IVTRIVELL

SEQ ID NO: 7077 - protein, 9 aa, HIV-1
RIVELLGRR

SEQ ID NO: 7078 - protein, 9 aa, HIV-1
VELLGRRGW

SEQ ID NO: 7079 - protein, 9 aa, HIV-1
LLGRRGWEA

SEQ ID NO: 7080 - protein, 9 aa, HIV-1
GRRGWEALK

SEQ ID NO: 7081 - protein, 9 aa, HIV-1
RRGWEALKY

SEQ ID NO: 7082 - protein, 9 aa, HIV-1
RGWEALKYW

SEQ ID NO: 7083 - protein, 9 aa, HIV-1
EALKYWWNL

SEQ ID NO: 7084 - protein, 9 aa, HIV-1
ALKYWWNLL

SEQ ID NO: 7085 - protein, 9 aa, HIV-1
KYWWNLLQY

SEQ ID NO: 7086 - protein, 9 aa, HIV-1
YWWNLLQYW

SEQ ID NO: 7087 - protein, 9 aa, HIV-1
LLQYWSQEL

SEQ ID NO: 7088 - protein, 9 aa, HIV-1
LQYWSQELK

SEQ ID NO: 7089 - protein, 9 aa, HIV-1
SQELKNSAV

SEQ ID NO: 7090 - protein, 9 aa, HIV-1
ELKNSAVSL

SEQ ID NO: 7091 - protein, 9 aa, HIV-1
LKNSAVSLL

SEQ ID NO: 7092 - protein, 9 aa, HIV-1
SAVSLLNAT

SEQ ID NO: 7093 - protein, 9 aa, HIV-1
SLLNATAIA

SEQ ID NO: 7094 - protein, 9 aa, HIV-1
LLNATAIAV

SEQ ID NO: 7095 - protein, 9 aa, HIV-1
TAIAVAEGT

SEQ ID NO: 7096 - protein, 9 aa, HIV-1
IAVAEGTDR

SEQ ID NO: 7097 - protein, 9 aa, HIV-1
AVAEGTDRV

SEQ ID NO: 7098 - protein, 9 aa, HIV-1
EGTDRVIEV

SEQ ID NO: 7099 - protein, 9 aa, HIV-1
GTDRVIEVV

SEQ ID NO: 7100 - protein, 9 aa, HIV-1
RVIEVVQGA

SEQ ID NO: 7101 - protein, 9 aa, HIV-1
EVVQGACRA

SEQ ID NO: 7102 - protein, 9 aa, HIV-1
VQGACRAIR

SEQ ID NO: 7103 - protein, 9 aa, HIV-1
RAIRHIPRR

SEQ ID NO: 7104 - protein, 9 aa, HIV-1
AIRHIPRRI

SEQ ID NO: 7105 - protein, 9 aa, HIV-1
IPRRIRQGL

SEQ ID NO: 7106 - protein, 9 aa, HIV-1
RRIRQGLER

SEQ ID NO: 7107 - protein, 9 aa, HIV-1
RIRQGLERI

SEQ ID NO: 7108 - protein, 9 aa, HIV-1
RQGLERILL

SEQ ID NO: 7109 - protein, 10 aa, HIV-1
RVKEKYQHLW

SEQ ID NO: 7110 - protein, 10 aa, HIV-1
KEKYQHLWRW

SEQ ID NO: 7111 - protein, 10 aa, HIV-1
KYQHLWRWGW

SEQ ID NO: 7112 - protein, 10 aa, HIV-1
YQHLWRWGWR

SEQ ID NO: 7113 - protein, 10 aa, HIV-1
HLWRWGWRWG

SEQ ID NO: 7114 - protein, 10 aa, HIV-1
WRWGWRWGTM

SEQ ID NO: 7115 - protein, 10 aa, HIV-1
RWGWRWGTML

SEQ ID NO: 7116 - protein, 10 aa, HIV-1
WGWRWGTMLL

SEQ ID NO: 7117 - protein, 10 aa, HIV-1
WRWGTMLLGM

SEQ ID NO: 7118 - protein, 10 aa, HIV-1
RWGTMLLGML

SEQ ID NO: 7119 - protein, 10 aa, HIV-1
TMLLGMLMIC

SEQ ID NO: 7120 - protein, 10 aa, HIV-1
MLLGMLMICS

SEQ ID NO: 7121 - protein, 10 aa, HIV-1
LLGMLMICSA

SEQ ID NO: 7122 - protein, 10 aa, HIV-1
MLMICSATEK

SEQ ID NO: 7123 - protein, 10 aa, HIV-1
LMICSATEKL

SEQ ID NO: 7124 - protein, 10 aa, HIV-1
SATEKLWVTV

SEQ ID NO: 7125 - protein, 10 aa, HIV-1
ATEKLWVTVY

SEQ ID NO: 7126 - protein, 10 aa, HIV-1
TEKLWVTVYY

SEQ ID NO: 7127 - protein, 10 aa, HIV-1
KLWVTVYYGV

SEQ ID NO: 7128 - protein, 10 aa, HIV-1
WVTVYYGVPV

SEQ ID NO: 7129 - protein, 10 aa, HIV-1
VTVYYGVPVW

SEQ ID NO: 7130 - protein, 10 aa, HIV-1
TVYYGVPVWK

SEQ ID NO: 7131 - protein, 10 aa, HIV-1
VPVWKEATTT

SEQ ID NO: 7132 - protein, 10 aa, HIV-1
PVWKEATTTL

SEQ ID NO: 7133 - protein, 10 aa, HIV-1
VWKEATTTLF

SEQ ID NO: 7134 - protein, 10 aa, HIV-1
TTTLFCASDA

SEQ ID NO: 7135 - protein, 10 aa, HIV-1
TTLFCASDAK

SEQ ID NO: 7136 - protein, 10 aa, HIV-1
TLFCASDAKA

SEQ ID NO: 7137 - protein, 10 aa, HIV-1
LFCASDAKAY

SEQ ID NO: 7138 - protein, 10 aa, HIV-1
KAYDTEVHNV

SEQ ID NO: 7139 - protein, 10 aa, HIV-1
AYDTEVHNVW

SEQ ID NO: 7140 - protein, 10 aa, HIV-1
EVHNVWATHA

SEQ ID NO: 7141 - protein, 10 aa, HIV-1
HNVWATHACV

SEQ ID NO: 7142 - protein, 10 aa, HIV-1
PTDPNPQEVV

SEQ ID NO: 7143 - protein, 10 aa, HIV-1
DPNPQEVVLV

SEQ ID NO: 7144 - protein, 10 aa, HIV-1
NPQEVVLVNV

SEQ ID NO: 7145 - protein, 10 aa, HIV-1
VVLVNVTENF

SEQ ID NO: 7146 - protein, 10 aa, HIV-1
NVTENFNMWK

SEQ ID NO: 7147 - protein, 10 aa, HIV-1
NMWKNDMVEQ

SEQ ID NO: 7148 - protein, 10 aa, HIV-1
EQMHEDIISL

SEQ ID NO: 7149 - protein, 10 aa, HIV-1
DIISLWDQSL

SEQ ID NO: 7150 - protein, 10 aa, HIV-1
IISLWDQSLK

SEQ ID NO: 7151 - protein, 10 aa, HIV-1
SLWDQSLKPC

SEQ ID NO: 7152 - protein, 10 aa, HIV-1
KLTPLCVSLK

SEQ ID NO: 7153 - protein, 10 aa, HIV-1
CVSLKCTDLK

SEQ ID NO: 7154 - protein, 10 aa, HIV-1
DTNTNSSSGR

SEQ ID NO: 7155 - protein, 10 aa, HIV-1
NTNSSSGRMI

SEQ ID NO: 7156 - protein, 10 aa, HIV-1
SSSGRMIMEK

SEQ ID NO: 7157 - protein, 10 aa, HIV-1
RMIMEKGEIK

SEQ ID NO: 7158 - protein, 10 aa, HIV-1
GEIKNCSFNI

SEQ ID NO: 7159 - protein, 10 aa, HIV-1
NCSFNISTSI

SEQ ID NO: 7160 - protein, 10 aa, HIV-1
CSFNISTSIR

SEQ ID NO: 7161 - protein, 10 aa, HIV-1
NISTSIRGKV

SEQ ID NO: 7162 - protein, 10 aa, HIV-1
STSIRGKVQK

SEQ ID NO: 7163 - protein, 10 aa, HIV-1
SIRGKVQKEY

SEQ ID NO: 7164 - protein, 10 aa, HIV-1
RGKVQKEYAF

SEQ ID NO: 7165 - protein, 10 aa, HIV-1
KVQKEYAFFY

SEQ ID NO: 7166 - protein, 10 aa, HIV-1
VQKEYAFFYK

SEQ ID NO: 7167 - protein, 10 aa, HIV-1
EYAFFYKLDI

SEQ ID NO: 7168 - protein, 10 aa, HIV-1
FFYKLDIIPI

SEQ ID NO: 7169 - protein, 10 aa, HIV-1
IPIDNDTTSY

SEQ ID NO: 7170 - protein, 10 aa, HIV-1
YKLTSCNTSV

SEQ ID NO: 7171 - protein, 10 aa, HIV-1
KLTSCNTSVI

SEQ ID NO: 7172 - protein, 10 aa, HIV-1
TSVITQACPK

SEQ ID NO: 7173 - protein, 10 aa, HIV-1
SVITQACPKV

SEQ ID NO: 7174 - protein, 10 aa, HIV-1
ITQACPKVSF

SEQ ID NO: 7175 - protein, 10 aa, HIV-1
VSFEPIPIHY

SEQ ID NO: 7176 - protein, 10 aa, HIV-1
EPIPIHYCAP

SEQ ID NO: 7177 - protein, 10 aa, HIV-1
IPIHYCAPAG

SEQ ID NO: 7178 - protein, 10 aa, HIV-1
HYCAPAGFAI

SEQ ID NO: 7179 - protein, 10 aa, HIV-1
YCAPAGFAIL

SEQ ID NO: 7180 - protein, 10 aa, HIV-1
CAPAGFAILK

SEQ ID NO: 7181 - protein, 10 aa, HIV-1
FAILKCNNKT

SEQ ID NO: 7182 - protein, 10 aa, HIV-1
AILKCNNKTF

SEQ ID NO: 7183 - protein, 10 aa, HIV-1
TGPCTNVSTV

SEQ ID NO: 7184 - protein, 10 aa, HIV-1
STVQCTHGIR

SEQ ID NO: 7185 - protein, 10 aa, HIV-1
VQCTHGIRPV

SEQ ID NO: 7186 - protein, 10 aa, HIV-1
GIRPVVSTQL

SEQ ID NO: 7187 - protein, 10 aa, HIV-1
RPVVSTQLLL

SEQ ID NO: 7188 - protein, 10 aa, HIV-1
STQLLLNGSL

SEQ ID NO: 7189 - protein, 10 aa, HIV-1
TQLLLNGSLA

SEQ ID NO: 7190 - protein, 10 aa, HIV-1
LLLNGSLAEE

SEQ ID NO: 7191 - protein, 10 aa, HIV-1
LNGSLAEEEV

SEQ ID NO: 7192 - protein, 10 aa, HIV-1
SLAEEEVVIR

SEQ ID NO: 7193 - protein, 10 aa, HIV-1
AEEEVVIRSV

SEQ ID NO: 7194 - protein, 10 aa, HIV-1
EEVVIRSVNF

SEQ ID NO: 7195 - protein, 10 aa, HIV-1
EVVIRSVNFT

SEQ ID NO: 7196 - protein, 10 aa, HIV-1
RSVNFTDNAK

SEQ ID NO: 7197 - protein, 10 aa, HIV-1
FTDNAKTIIV

SEQ ID NO: 7198 - protein, 10 aa, HIV-1
TIIVQLNTSV

SEQ ID NO: 7199 - protein, 10 aa, HIV-1
NTSVEINCTR

SEQ ID NO: 7200 - protein, 10 aa, HIV-1
CTRPNNNTRK

SEQ ID NO: 7201 - protein, 10 aa, HIV-1
RPNNNTRKRI

SEQ ID NO: 7202 - protein, 10 aa, HIV-1
NTRKRIRIQR

SEQ ID NO: 7203 - protein, 10 aa, HIV-1
RIRIQRGPGR

SEQ ID NO: 7204 - protein, 10 aa, HIV-1
RIQRGPGRAF

SEQ ID NO: 7205 - protein, 10 aa, HIV-1
IQRGPGRAFV

SEQ ID NO: 7206 - protein, 10 aa, HIV-1
PGRAFVTIGK

SEQ ID NO: 7207 - protein, 10 aa, HIV-1
FVTIGKIGNM

SEQ ID NO: 7208 - protein, 10 aa, HIV-1
VTIGKIGNMR

SEQ ID NO: 7209 - protein, 10 aa, HIV-1
MRQAHCNISR

SEQ ID NO: 7210 - protein, 10 aa, HIV-1
RQAHCNISRA

SEQ ID NO: 7211 - protein, 10 aa, HIV-1
QAHCNISRAK

SEQ ID NO: 7212 - protein, 10 aa, HIV-1
SRAKWNNTLK

SEQ ID NO: 7213 - protein, 10 aa, HIV-1
NTLKQIASKL

SEQ ID NO: 7214 - protein, 10 aa, HIV-1
TLKQIASKLR

SEQ ID NO: 7215 - protein, 10 aa, HIV-1
QIASKLREQF

SEQ ID NO: 7216 - protein, 10 aa, HIV-1
KLREQFGNNK

SEQ ID NO: 7217 - protein, 10 aa, HIV-1
REQFGNNKTI

SEQ ID NO: 7218 - protein, 10 aa, HIV-1
QFGNNKTIIF

SEQ ID NO: 7219 - protein, 10 aa, HIV-1
FGNNKTIIFK

SEQ ID NO: 7220 - protein, 10 aa, HIV-1
KQSSGGDPEI

SEQ ID NO: 7221 - protein, 10 aa, HIV-1
HSFNCGGEFF

SEQ ID NO: 7222 - protein, 10 aa, HIV-1
SFNCGGEFFY

SEQ ID NO: 7223 - protein, 10 aa, HIV-1
EFFYCNSTQL

SEQ ID NO: 7224 - protein, 10 aa, HIV-1
FFYCNSTQLF

SEQ ID NO: 7225 - protein, 10 aa, HIV-1
NSTQLFNSTW

SEQ ID NO: 7226 - protein, 10 aa, HIV-1
STQLFNSTWF

SEQ ID NO: 7227 - protein, 10 aa, HIV-1
QLFNSTWFNS

SEQ ID NO: 7228 - protein, 10 aa, HIV-1
STWFNSTWST

SEQ ID NO: 7229 - protein, 10 aa, HIV-1
GSDTITLPCR

SEQ ID NO: 7230 - protein, 10 aa, HIV-1
DTITLPCRIK

SEQ ID NO: 7231 - protein, 10 aa, HIV-1
TLPCRIKQII

SEQ ID NO: 7232 - protein, 10 aa, HIV-1
LPCRIKQIIN

SEQ ID NO: 7233 - protein, 10 aa, HIV-1
RIKQIINMWQ

SEQ ID NO: 7234 - protein, 10 aa, HIV-1
KQIINMWQKV

SEQ ID NO: 7235 - protein, 10 aa, HIV-1
IINMWQKVGK

SEQ ID NO: 7236 - protein, 10 aa, HIV-1
NMWQKVGKAM

SEQ ID NO: 7237 - protein, 10 aa, HIV-1
MWQKVGKAMY

SEQ ID NO: 7238 - protein, 10 aa, HIV-1
WQKVGKAMYA

SEQ ID NO: 7239 - protein, 10 aa, HIV-1
AMYAPPISGQ

SEQ ID NO: 7240 - protein, 10 aa, HIV-1
MYAPPISGQI

SEQ ID NO: 7241 - protein, 10 aa, HIV-1
YAPPISGQIR

SEQ ID NO: 7242 - protein, 10 aa, HIV-1
NSNNESEIFR

SEQ ID NO: 7243 - protein, 10 aa, HIV-1
EIFRPGGGDM

SEQ ID NO: 7244 - protein, 10 aa, HIV-1
DMRDNWRSEL

SEQ ID NO: 7245 - protein, 10 aa, HIV-1
MRDNWRSELY

SEQ ID NO: 7246 - protein, 10 aa, HIV-1
RDNWRSELYK

SEQ ID NO: 7247 - protein, 10 aa, HIV-1
SELYKYKVVK

SEQ ID NO: 7248 - protein, 10 aa, HIV-1
ELYKYKVVKI

SEQ ID NO: 7249 - protein, 10 aa, HIV-1
KYKVVKIEPL

SEQ ID NO: 7250 - protein, 10 aa, HIV-1
KVVKIEPLGV

SEQ ID NO: 7251 - protein, 10 aa, HIV-1
EPLGVAPTKA

SEQ ID NO: 7252 - protein, 10 aa, HIV-1
GVAPTKAKRR

SEQ ID NO: 7253 - protein, 10 aa, HIV-1
APTKAKRRVV

SEQ ID NO: 7254 - protein, 10 aa, HIV-1
TKAKRRVVQR

SEQ ID NO: 7255 - protein, 10 aa, HIV-1
AKRRVVQREK

SEQ ID NO: 7256 - protein, 10 aa, HIV-1
KRRVVQREKR

SEQ ID NO: 7257 - protein, 10 aa, HIV-1
RVVQREKRAV

SEQ ID NO: 7258 - protein, 10 aa, HIV-1
KRAVGIGALF

SEQ ID NO: 7259 - protein, 10 aa, HIV-1
RAVGIGALFL

SEQ ID NO: 7260 - protein, 10 aa, HIV-1
GIGALFLGFL

SEQ ID NO: 7261 - protein, 10 aa, HIV-1
ALFLGFLGAA

SEQ ID NO: 7262 - protein, 10 aa, HIV-1
FLGFLGAAGS

SEQ ID NO: 7263 - protein, 10 aa, HIV-1
FLGAAGSTMG

SEQ ID NO: 7264 - protein, 10 aa, HIV-1
LGAAGSTMGA

SEQ ID NO: 7265 - protein, 10 aa, HIV-1
GAAGSTMGAA

SEQ ID NO: 7266 - protein, 10 aa, HIV-1
STMGAASMTL

SEQ ID NO: 7267 - protein, 10 aa, HIV-1
TMGAASMTLT

SEQ ID NO: 7268 - protein, 10 aa, HIV-1
MGAASMTLTV

SEQ ID NO: 7269 - protein, 10 aa, HIV-1
ASMTLTVQAR

SEQ ID NO: 7270 - protein, 10 aa, HIV-1
SMTLTVQARQ

SEQ ID NO: 7271 - protein, 10 aa, HIV-1
MTLTVQARQL

SEQ ID NO: 7272 - protein, 10 aa, HIV-1
TLTVQARQLL

SEQ ID NO: 7273 - protein, 10 aa, HIV-1
VQARQLLSGI

SEQ ID NO: 7274 - protein, 10 aa, HIV-1
QLLSGIVQQQ

SEQ ID NO: 7275 - protein, 10 aa, HIV-1
GIVQQQNNLL

SEQ ID NO: 7276 - protein, 10 aa, HIV-1
IVQQQNNLLR

SEQ ID NO: 7277 - protein, 10 aa, HIV-1
VQQQNNLLRA

SEQ ID NO: 7278 - protein, 10 aa, HIV-1
QQQNNLLRAI

SEQ ID NO: 7279 - protein, 10 aa, HIV-1
NLLRAIEAQQ

SEQ ID NO: 7280 - protein, 10 aa, HIV-1
RAIEAQQHLL

SEQ ID NO: 7281 - protein, 10 aa, HIV-1
IEAQQHLLQL

SEQ ID NO: 7282 - protein, 10 aa, HIV-1
AQQHLLQLTV

SEQ ID NO: 7283 - protein, 10 aa, HIV-1
HLLQLTVWGI

SEQ ID NO: 7284 - protein, 10 aa, HIV-1
LLQLTVWGIK

SEQ ID NO: 7285 - protein, 10 aa, HIV-1
QLTVWGIKQL

SEQ ID NO: 7286 - protein, 10 aa, HIV-1
TVWGIKQLQA

SEQ ID NO: 7287 - protein, 10 aa, HIV-1
VWGIKQLQAR

SEQ ID NO: 7288 - protein, 10 aa, HIV-1
KQLQARILAV

SEQ ID NO: 7289 - protein, 10 aa, HIV-1
LQARILAVER

SEQ ID NO: 7290 - protein, 10 aa, HIV-1
RILAVERYLK

SEQ ID NO: 7291 - protein, 10 aa, HIV-1
VERYLKDQQL

SEQ ID NO: 7292 - protein, 10 aa, HIV-1
YLKDQQLLGI

SEQ ID NO: 7293 - protein, 10 aa, HIV-1
LLGIWGCSGK

SEQ ID NO: 7294 - protein, 10 aa, HIV-1
GIWGCSGKLI

SEQ ID NO: 7295 - protein, 10 aa, HIV-1
KLICTTAVPW

SEQ ID NO: 7296 - protein, 10 aa, HIV-1
CTTAVPWNAS

SEQ ID NO: 7297 - protein, 10 aa, HIV-1
TTAVPWNASW

SEQ ID NO: 7298 - protein, 10 aa, HIV-1
SWSNKSLEQI

SEQ ID NO: 7299 - protein, 10 aa, HIV-1
WSNKSLEQIW

SEQ ID NO: 7300 - protein, 10 aa, HIV-1
SLEQIWNHTT

SEQ ID NO: 7301 - protein, 10 aa, HIV-1
EQIWNHTTWM

SEQ ID NO: 7302 - protein, 10 aa, HIV-1
IWNHTTWMEW

SEQ ID NO: 7303 - protein, 10 aa, HIV-1
TTWMEWDREI

SEQ ID NO: 7304 - protein, 10 aa, HIV-1
MEWDREINNY

SEQ ID NO: 7305 - protein, 10 aa, HIV-1
REINNYTSLI

SEQ ID NO: 7306 - protein, 10 aa, HIV-1
NYTSLIHSLI

SEQ ID NO: 7307 - protein, 10 aa, HIV-1
SLIHSLIEES

SEQ ID NO: 7308 - protein, 10 aa, HIV-1
SLIEESQNQQ

SEQ ID NO: 7309 - protein, 10 aa, HIV-1
ELLELDKWAS

SEQ ID NO: 7310 - protein, 10 aa, HIV-1
LLELDKWASL

SEQ ID NO: 7311 - protein, 10 aa, HIV-1
WASLWNWFNI

SEQ ID NO: 7312 - protein, 10 aa, HIV-1
SLWNWFNITN

SEQ ID NO: 7313 - protein, 10 aa, HIV-1
LWNWFNITNW

SEQ ID NO: 7314 - protein, 10 aa, HIV-1
NWFNITNWLW

SEQ ID NO: 7315 - protein, 10 aa, HIV-1
WFNITNWLWY

SEQ ID NO: 7316 - protein, 10 aa, HIV-1
FNITNWLWYI

SEQ ID NO: 7317 - protein, 10 aa, HIV-1
NITNWLWYIK

SEQ ID NO: 7318 - protein, 10 aa, HIV-1
ITNWLWYIKL

SEQ ID NO: 7319 - protein, 10 aa, HIV-1
NWLWYIKLFI

SEQ ID NO: 7320 - protein, 10 aa, HIV-1
WLWYIKLFIM

SEQ ID NO: 7321 - protein, 10 aa, HIV-1
LWYIKLFIMI

SEQ ID NO: 7322 - protein, 10 aa, HIV-1
WYIKLFIMIV

SEQ ID NO: 7323 - protein, 10 aa, HIV-1
KLFIMIVGGL

SEQ ID NO: 7324 - protein, 10 aa, HIV-1
IMIVGGLVGL

SEQ ID NO: 7325 - protein, 10 aa, HIV-1
MIVGGLVGLR

SEQ ID NO: 7326 - protein, 10 aa, HIV-1
GLVGLRIVFA

SEQ ID NO: 7327 - protein, 10 aa, HIV-1
LVGLRIVFAV

SEQ ID NO: 7328 - protein, 10 aa, HIV-1
RIVFAVLSIV

SEQ ID NO: 7329 - protein, 10 aa, HIV-1
VFAVLSIVNR

SEQ ID NO: 7330 - protein, 10 aa, HIV-1
FAVLSIVNRV

SEQ ID NO: 7331 - protein, 10 aa, HIV-1
AVLSIVNRVR

SEQ ID NO: 7332 - protein, 10 aa, HIV-1
SIVNRVRQGY

SEQ ID NO: 7333 - protein, 10 aa, HIV-1
RVRQGYSPLS

SEQ ID NO: 7334 - protein, 10 aa, HIV-1
VRQGYSPLSF

SEQ ID NO: 7335 - protein, 10 aa, HIV-1
SFQTHLPTPR

SEQ ID NO: 7336 - protein, 10 aa, HIV-1
ERDRDRSIRL

SEQ ID NO: 7337 - protein, 10 aa, HIV-1
IRLVNGSLAL

SEQ ID NO: 7338 - protein, 10 aa, HIV-1
RLVNGSLALI

SEQ ID NO: 7339 - protein, 10 aa, HIV-1
LVNGSLALIW

SEQ ID NO: 7340 - protein, 10 aa, HIV-1
SLALIWDDLR

SEQ ID NO: 7341 - protein, 10 aa, HIV-1
ALIWDDLRSL

SEQ ID NO: 7342 - protein, 10 aa, HIV-1
LIWDDLRSLC

SEQ ID NO: 7343 - protein, 10 aa, HIV-1
DLRSLCLFSY

SEQ ID NO: 7344 - protein, 10 aa, HIV-1
RSLCLFSYHR

SEQ ID NO: 7345 - protein, 10 aa, HIV-1
SLCLFSYHRL

SEQ ID NO: 7346 - protein, 10 aa, HIV-1
LCLFSYHRLR

SEQ ID NO: 7347 - protein, 10 aa, HIV-1
FSYHRLRDLL

SEQ ID NO: 7348 - protein, 10 aa, HIV-1
SYHRLRDLLL

SEQ ID NO: 7349 - protein, 10 aa, HIV-1
RLRDLLLIVT

SEQ ID NO: 7350 - protein, 10 aa, HIV-1
DLLLIVTRIV

SEQ ID NO: 7351 - protein, 10 aa, HIV-1
LLIVTRIVEL

SEQ ID NO: 7352 - protein, 10 aa, HIV-1
LIVTRIVELL

SEQ ID NO: 7353 - protein, 10 aa, HIV-1
VTRIVELLGR

SEQ ID NO: 7354 - protein, 10 aa, HIV-1
ELLGRRGWEA

SEQ ID NO: 7355 - protein, 10 aa, HIV-1
LLGRRGWEAL

SEQ ID NO: 7356 - protein, 10 aa, HIV-1
LGRRGWEALK

SEQ ID NO: 7357 - protein, 10 aa, HIV-1
GRRGWEALKY

SEQ ID NO: 7358 - protein, 10 aa, HIV-1
RGWEALKYWW

SEQ ID NO: 7359 - protein, 10 aa, HIV-1
WEALKYWWNL

SEQ ID NO: 7360 - protein, 10 aa, HIV-1
EALKYWWNLL

SEQ ID NO: 7361 - protein, 10 aa, HIV-1
LKYWWNLLQY

SEQ ID NO: 7362 - protein, 10 aa, HIV-1
KYWWNLLQYW

SEQ ID NO: 7363 - protein, 10 aa, HIV-1
NLLQYWSQEL

SEQ ID NO: 7364 - protein, 10 aa, HIV-1
LLQYWSQELK

SEQ ID NO: 7365 - protein, 10 aa, HIV-1
WSQELKNSAV

SEQ ID NO: 7366 - protein, 10 aa, HIV-1
QELKNSAVSL

SEQ ID NO: 7367 - protein, 10 aa, HIV-1
ELKNSAVSLL

SEQ ID NO: 7368 - protein, 10 aa, HIV-1
SLLNATAIAV

SEQ ID NO: 7369 - protein, 10 aa, HIV-1
LLNATAIAVA

SEQ ID NO: 7370 - protein, 10 aa, HIV-1
IAVAEGTDRV

SEQ ID NO: 7371 - protein, 10 aa, HIV-1
AVAEGTDRVI

SEQ ID NO: 7372 - protein, 10 aa, HIV-1
AEGTDRVIEV

SEQ ID NO: 7373 - protein, 10 aa, HIV-1
EGTDRVIEVV

SEQ ID NO: 7374 - protein, 10 aa, HIV-1
EVVQGACRAI

SEQ ID NO: 7375 - protein, 10 aa, HIV-1
VVQGACRAIR

SEQ ID NO: 7376 - protein, 10 aa, HIV-1
ACRAIRHIPR

SEQ ID NO: 7377 - protein, 10 aa, HIV-1
AIRHIPRRIR

SEQ ID NO: 7378 - protein, 10 aa, HIV-1
HIPRRIRQGL

SEQ ID NO: 7379 - protein, 10 aa, HIV-1
RRIRQGLERI

SEQ ID NO: 7380 - protein, 10 aa, HIV-1
RIRQGLERIL

SEQ ID NO: 7381 - protein, 11 aa, HIV-1
RVKEKYQHLWR

SEQ ID NO: 7382 - protein, 11 aa, HIV-1
KYQHLWRWGWR

SEQ ID NO: 7383 - protein, 11 aa, HIV-1
YQHLWRWGWRW

SEQ ID NO: 7384 - protein, 11 aa, HIV-1
HLWRWGWRWGT

SEQ ID NO: 7385 - protein, 11 aa, HIV-1
WRWGWRWGTML

SEQ ID NO: 7386 - protein, 11 aa, HIV-1
RWGWRWGTMLL

SEQ ID NO: 7387 - protein, 11 aa, HIV-1
WRWGTMLLGML

SEQ ID NO: 7388 - protein, 11 aa, HIV-1
MLLGMLMICSA

SEQ ID NO: 7389 - protein, 11 aa, HIV-1
LLGMLMICSAT

SEQ ID NO: 7390 - protein, 11 aa, HIV-1
GMLMICSATEK

SEQ ID NO: 7391 - protein, 11 aa, HIV-1
MLMICSATEKL

SEQ ID NO: 7392 - protein, 11 aa, HIV-1
LMICSATEKLW

SEQ ID NO: 7393 - protein, 11 aa, HIV-1
MICSATEKLWV

SEQ ID NO: 7394 - protein, 11 aa, HIV-1
CSATEKLWVTV

SEQ ID NO: 7395 - protein, 11 aa, HIV-1
SATEKLWVTVY

SEQ ID NO: 7396 - protein, 11 aa, HIV-1
ATEKLWVTVYY

SEQ ID NO: 7397 - protein, 11 aa, HIV-1
EKLWVTVYYGV

SEQ ID NO: 7398 - protein, 11 aa, HIV-1
WVTVYYGVPVW

SEQ ID NO: 7399 - protein, 11 aa, HIV-1
VTVYYGVPVWK

SEQ ID NO: 7400 - protein, 11 aa, HIV-1
VPVWKEATTTL

SEQ ID NO: 7401 - protein, 11 aa, HIV-1
PVWKEATTTLF

SEQ ID NO: 7402 - protein, 11 aa, HIV-1
TTTLFCASDAK

SEQ ID NO: 7403 - protein, 11 aa, HIV-1
TTLFCASDAKA

SEQ ID NO: 7404 - protein, 11 aa, HIV-1
TLFCASDAKAY

SEQ ID NO: 7405 - protein, 11 aa, HIV-1
KAYDTEVHNVW

SEQ ID NO: 7406 - protein, 11 aa, HIV-1
NVWATHACVPT

SEQ ID NO: 7407 - protein, 11 aa, HIV-1
CVPTDPNPQEV

SEQ ID NO: 7408 - protein, 11 aa, HIV-1
VPTDPNPQEVV

SEQ ID NO: 7409 - protein, 11 aa, HIV-1
PTDPNPQEVVL

SEQ ID NO: 7410 - protein, 11 aa, HIV-1
NPQEVVLVNVT

SEQ ID NO: 7411 - protein, 11 aa, HIV-1
EVVLVNVTENF

SEQ ID NO: 7412 - protein, 11 aa, HIV-1
VLVNVTENFNM

SEQ ID NO: 7413 - protein, 11 aa, HIV-1
LVNVTENFNMW

SEQ ID NO: 7414 - protein, 11 aa, HIV-1
NMWKNDMVEQM

SEQ ID NO: 7415 - protein, 11 aa, HIV-1
DMVEQMHEDII

SEQ ID NO: 7416 - protein, 11 aa, HIV-1
VEQMHEDIISL

SEQ ID NO: 7417 - protein, 11 aa, HIV-1
DIISLWDQSLK

SEQ ID NO: 7418 - protein, 11 aa, HIV-1
SLWDQSLKPCV

SEQ ID NO: 7419 - protein, 11 aa, HIV-1
SLKPCVKLTPL

SEQ ID NO: 7420 - protein, 11 aa, HIV-1
KPCVKLTPLCV

SEQ ID NO: 7421 - protein, 11 aa, HIV-1
KLTPLCVSLKC

SEQ ID NO: 7422 - protein, 11 aa, HIV-1
DTNTNSSSGRM

SEQ ID NO: 7423 - protein, 11 aa, HIV-1
NTNSSSGRMIM

SEQ ID NO: 7424 - protein, 11 aa, HIV-1
NSSSGRMIMEK

SEQ ID NO: 7425 - protein, 11 aa, HIV-1
GRMIMEKGEIK

SEQ ID NO: 7426 - protein, 11 aa, HIV-1
MEKGEIKNCSF

SEQ ID NO: 7427 - protein, 11 aa, HIV-1
NCSFNISTSIR

SEQ ID NO: 7428 - protein, 11 aa, HIV-1
SFNISTSIRGK

SEQ ID NO: 7429 - protein, 11 aa, HIV-1
ISTSIRGKVQK

SEQ ID NO: 7430 - protein, 11 aa, HIV-1
TSIRGKVQKEY

SEQ ID NO: 7431 - protein, 11 aa, HIV-1
SIRGKVQKEYA

SEQ ID NO: 7432 - protein, 11 aa, HIV-1
KVQKEYAFFYK

SEQ ID NO: 7433 - protein, 11 aa, HIV-1
VQKEYAFFYKL

SEQ ID NO: 7434 - protein, 11 aa, HIV-1
KEYAFFYKLDI

SEQ ID NO: 7435 - protein, 11 aa, HIV-1
EYAFFYKLDII

SEQ ID NO: 7436 - protein, 11 aa, HIV-1
IIPIDNDTTSY

SEQ ID NO: 7437 - protein, 11 aa, HIV-1
IPIDNDTTSYK

SEQ ID NO: 7438 - protein, 11 aa, HIV-1
PIDNDTTSYKL

SEQ ID NO: 7439 - protein, 11 aa, HIV-1
KLTSCNTSVIT

SEQ ID NO: 7440 - protein, 11 aa, HIV-1
NTSVITQACPK

SEQ ID NO: 7441 - protein, 11 aa, HIV-1
QACPKVSFEPI

SEQ ID NO: 7442 - protein, 11 aa, HIV-1
CPKVSFEPIPI

SEQ ID NO: 7443 - protein, 11 aa, HIV-1
KVSFEPIPIHY

SEQ ID NO: 7444 - protein, 11 aa, HIV-1
EPIPIHYCAPA

SEQ ID NO: 7445 - protein, 11 aa, HIV-1
IPIHYCAPAGF

SEQ ID NO: 7446 - protein, 11 aa, HIV-1
HYCAPAGFAIL

SEQ ID NO: 7447 - protein, 11 aa, HIV-1
AGFAILKCNNK

SEQ ID NO: 7448 - protein, 11 aa, HIV-1
FAILKCNNKTF

SEQ ID NO: 7449 - protein, 11 aa, HIV-1
GTGPCTNVSTV

SEQ ID NO: 7450 - protein, 11 aa, HIV-1
NVSTVQCTHGI

SEQ ID NO: 7451 - protein, 11 aa, HIV-1
VSTVQCTHGIR

SEQ ID NO: 7452 - protein, 11 aa, HIV-1
TVQCTHGIRPV

SEQ ID NO: 7453 - protein, 11 aa, HIV-1
GIRPVVSTQLL

SEQ ID NO: 7454 - protein, 11 aa, HIV-1
LLLNGSLAEEE

SEQ ID NO: 7455 - protein, 11 aa, HIV-1
LLNGSLAEEEV

SEQ ID NO: 7456 - protein, 11 aa, HIV-1
SLAEEEVVIRS

SEQ ID NO: 7457 - protein, 11 aa, HIV-1
EEEVVIRSVNF

SEQ ID NO: 7458 - protein, 11 aa, HIV-1
EEVVIRSVNFT

SEQ ID NO: 7459 - protein, 11 aa, HIV-1
NFTDNAKTIIV

SEQ ID NO: 7460 - protein, 11 aa, HIV-1
KTIIVQLNTSV

SEQ ID NO: 7461 - protein, 11 aa, HIV-1
IIVQLNTSVEI

SEQ ID NO: 7462 - protein, 11 aa, HIV-1
QLNTSVEINCT

SEQ ID NO: 7463 - protein, 11 aa, HIV-1
LNTSVEINCTR

SEQ ID NO: 7464 - protein, 11 aa, HIV-1
CTRPNNNTRKR

SEQ ID NO: 7465 - protein, 11 aa, HIV-1
RPNNNTRKRIR

SEQ ID NO: 7466 - protein, 11 aa, HIV-1
NNTRKRIRIQR

SEQ ID NO: 7467 - protein, 11 aa, HIV-1
KRIRIQRGPGR

SEQ ID NO: 7468 - protein, 11 aa, HIV-1
RIQRGPGRAFV

SEQ ID NO: 7469 - protein, 11 aa, HIV-1
IQRGPGRAFVT

SEQ ID NO: 7470 - protein, 11 aa, HIV-1
FVTIGKIGNMR

SEQ ID NO: 7471 - protein, 11 aa, HIV-1
NMRQAHCNISR

SEQ ID NO: 7472 - protein, 11 aa, HIV-1
RQAHCNISRAK

SEQ ID NO: 7473 - protein, 11 aa, HIV-1
NISRAKWNNTL

SEQ ID NO: 7474 - protein, 11 aa, HIV-1
ISRAKWNNTLK

SEQ ID NO: 7475 - protein, 11 aa, HIV-1
NTLKQIASKLR

SEQ ID NO: 7476 - protein, 11 aa, HIV-1
KQIASKLREQF

SEQ ID NO: 7477 - protein, 11 aa, HIV-1
KLREQFGNNKT

SEQ ID NO: 7478 - protein, 11 aa, HIV-1
REQFGNNKTII

SEQ ID NO: 7479 - protein, 11 aa, HIV-1
EQFGNNKTIIF

SEQ ID NO: 7480 - protein, 11 aa, HIV-1
QFGNNKTIIFK

SEQ ID NO: 7481 - protein, 11 aa, HIV-1
KQSSGGDPEIV

SEQ ID NO: 7482 - protein, 11 aa, HIV-1
HSFNCGGEFFY

SEQ ID NO: 7483 - protein, 11 aa, HIV-1
GEFFYCNSTQL

SEQ ID NO: 7484 - protein, 11 aa, HIV-1
EFFYCNSTQLF

SEQ ID NO: 7485 - protein, 11 aa, HIV-1
QLFNSTWFNST

SEQ ID NO: 7486 - protein, 11 aa, HIV-1
LFNSTWFNSTW

SEQ ID NO: 7487 - protein, 11 aa, HIV-1
STWSTEGSNNT

SEQ ID NO: 7488 - protein, 11 aa, HIV-1
EGSDTITLPCR

SEQ ID NO: 7489 - protein, 11 aa, HIV-1
LPCRIKQIINM

SEQ ID NO: 7490 - protein, 11 aa, HIV-1
RIKQIINMWQK

SEQ ID NO: 7491 - protein, 11 aa, HIV-1
QIINMWQKVGK

SEQ ID NO: 7492 - protein, 11 aa, HIV-1
IINMWQKVGKA

SEQ ID NO: 7493 - protein, 11 aa, HIV-1
NMWQKVGKAMY

SEQ ID NO: 7494 - protein, 11 aa, HIV-1
KVGKAMYAPPI

SEQ ID NO: 7495 - protein, 11 aa, HIV-1
AMYAPPISGQI

SEQ ID NO: 7496 - protein, 11 aa, HIV-1
MYAPPISGQIR

SEQ ID NO: 7497 - protein, 11 aa, HIV-1
QIRCSSNITGL

SEQ ID NO: 7498 - protein, 11 aa, HIV-1
SSNITGLLLTR

SEQ ID NO: 7499 - protein, 11 aa, HIV-1
SEIFRPGGGDM

SEQ ID NO: 7500 - protein, 11 aa, HIV-1
EIFRPGGGDMR

SEQ ID NO: 7501 - protein, 11 aa, HIV-1
RPGGGDMRDNW

SEQ ID NO: 7502 - protein, 11 aa, HIV-1
DMRDNWRSELY

SEQ ID NO: 7503 - protein, 11 aa, HIV-1
RSELYKYKVVK

SEQ ID NO: 7504 - protein, 11 aa, HIV-1
YKYKVVKIEPL

SEQ ID NO: 7505 - protein, 11 aa, HIV-1
KIEPLGVAPTK

SEQ ID NO: 7506 - protein, 11 aa, HIV-1
GVAPTKAKRRV

SEQ ID NO: 7507 - protein, 11 aa, HIV-1
APTKAKRRVVQ

SEQ ID NO: 7508 - protein, 11 aa, HIV-1
PTKAKRRVVQR

SEQ ID NO: 7509 - protein, 11 aa, HIV-1
KAKRRVVQREK

SEQ ID NO: 7510 - protein, 11 aa, HIV-1
RRVVQREKRAV

SEQ ID NO: 7511 - protein, 11 aa, HIV-1
REKRAVGIGAL

SEQ ID NO: 7512 - protein, 11 aa, HIV-1
AVGIGALFLGF

SEQ ID NO: 7513 - protein, 11 aa, HIV-1
FLGFLGAAGST

SEQ ID NO: 7514 - protein, 11 aa, HIV-1
FLGAAGSTMGA

SEQ ID NO: 7515 - protein, 11 aa, HIV-1
STMGAASMTLT

SEQ ID NO: 7516 - protein, 11 aa, HIV-1
TMGAASMTLTV

SEQ ID NO: 7517 - protein, 11 aa, HIV-1
AASMTLTVQAR

SEQ ID NO: 7518 - protein, 11 aa, HIV-1
SMTLTVQARQL

SEQ ID NO: 7519 - protein, 11 aa, HIV-1
MTLTVQARQLL

SEQ ID NO: 7520 - protein, 11 aa, HIV-1
TVQARQLLSGI

SEQ ID NO: 7521 - protein, 11 aa, HIV-1
VQARQLLSGIV

SEQ ID NO: 7522 - protein, 11 aa, HIV-1
GIVQQQNNLLR

SEQ ID NO: 7523 - protein, 11 aa, HIV-1
VQQQNNLLRAI

SEQ ID NO: 7524 - protein, 11 aa, HIV-1
QQNNLLRAIEA

SEQ ID NO: 7525 - protein, 11 aa, HIV-1
LLRAIEAQQHL

SEQ ID NO: 7526 - protein, 11 aa, HIV-1
AIEAQQHLLQL

SEQ ID NO: 7527 - protein, 11 aa, HIV-1
EAQQHLLQLTV

SEQ ID NO: 7528 - protein, 11 aa, HIV-1
HLLQLTVWGIK

SEQ ID NO: 7529 - protein, 11 aa, HIV-1
LQLTVWGIKQL

SEQ ID NO: 7530 - protein, 11 aa, HIV-1
QLTVWGIKQLQ

SEQ ID NO: 7531 - protein, 11 aa, HIV-1
TVWGIKQLQAR

SEQ ID NO: 7532 - protein, 11 aa, HIV-1
VWGIKQLQARI

SEQ ID NO: 7533 - protein, 11 aa, HIV-1
KQLQARILAVE

SEQ ID NO: 7534 - protein, 11 aa, HIV-1
QLQARILAVER

SEQ ID NO: 7535 - protein, 11 aa, HIV-1
LQARILAVERY

SEQ ID NO: 7536 - protein, 11 aa, HIV-1
ARILAVERYLK

SEQ ID NO: 7537 - protein, 11 aa, HIV-1
AVERYLKDQQL

SEQ ID NO: 7538 - protein, 11 aa, HIV-1
VERYLKDQQLL

SEQ ID NO: 7539 - protein, 11 aa, HIV-1
RYLKDQQLLGI

SEQ ID NO: 7540 - protein, 11 aa, HIV-1
QLLGIWGCSGK

SEQ ID NO: 7541 - protein, 11 aa, HIV-1
LLGIWGCSGKL

SEQ ID NO: 7542 - protein, 11 aa, HIV-1
CTTAVPWNASW

SEQ ID NO: 7543 - protein, 11 aa, HIV-1
TTAVPWNASWS

SEQ ID NO: 7544 - protein, 11 aa, HIV-1
AVPWNASWSNK

SEQ ID NO: 7545 - protein, 11 aa, HIV-1
VPWNASWSNKS

SEQ ID NO: 7546 - protein, 11 aa, HIV-1
QIWNHTTWMEW

SEQ ID NO: 7547 - protein, 11 aa, HIV-1
WMEWDREINNY

SEQ ID NO: 7548 - protein, 11 aa, HIV-1
WDREINNYTSL

SEQ ID NO: 7549 - protein, 11 aa, HIV-1
SLIHSLIEESQ

SEQ ID NO: 7550 - protein, 11 aa, HIV-1
SLIEESQNQQE

SEQ ID NO: 7551 - protein, 11 aa, HIV-1
QEKNEQELLEL

SEQ ID NO: 7552 - protein, 11 aa, HIV-1
ELLELDKWASL

SEQ ID NO: 7553 - protein, 11 aa, HIV-1
KWASLWNWFNI

SEQ ID NO: 7554 - protein, 11 aa, HIV-1
WASLWNWFNIT

SEQ ID NO: 7555 - protein, 11 aa, HIV-1
SLWNWFNITNW

SEQ ID NO: 7556 - protein, 11 aa, HIV-1
LWNWFNITNWL

SEQ ID NO: 7557 - protein, 11 aa, HIV-1
NWFNITNWLWY

SEQ ID NO: 7558 - protein, 11 aa, HIV-1
WFNITNWLWYI

SEQ ID NO: 7559 - protein, 11 aa, HIV-1
NITNWLWYIKL

SEQ ID NO: 7560 - protein, 11 aa, HIV-1
ITNWLWYIKLF

SEQ ID NO: 7561 - protein, 11 aa, HIV-1
WLWYIKLFIMI

SEQ ID NO: 7562 - protein, 11 aa, HIV-1
KLFIMIVGGLV

SEQ ID NO: 7563 - protein, 11 aa, HIV-1
FIMIVGGLVGL

SEQ ID NO: 7564 - protein, 11 aa, HIV-1
IMIVGGLVGLR

SEQ ID NO: 7565 - protein, 11 aa, HIV-1
MIVGGLVGLRI

SEQ ID NO: 7566 - protein, 11 aa, HIV-1
IVGGLVGLRIV

SEQ ID NO: 7567 - protein, 11 aa, HIV-1
GLVGLRIVFAV

SEQ ID NO: 7568 - protein, 11 aa, HIV-1
GLRIVFAVLSI

SEQ ID NO: 7569 - protein, 11 aa, HIV-1
IVFAVLSIVNR

SEQ ID NO: 7570 - protein, 11 aa, HIV-1
FAVLSIVNRVR

SEQ ID NO: 7571 - protein, 11 aa, HIV-1
LSIVNRVRQGY

SEQ ID NO: 7572 - protein, 11 aa, HIV-1
RVRQGYSPLSF

SEQ ID NO: 7573 - protein, 11 aa, HIV-1
RQGYSPLSFQT

SEQ ID NO: 7574 - protein, 11 aa, HIV-1
GYSPLSFQTHL

SEQ ID NO: 7575 - protein, 11 aa, HIV-1
SPLSFQTHLPT

SEQ ID NO: 7576 - protein, 11 aa, HIV-1
LSFQTHLPTPR

SEQ ID NO: 7577 - protein, 11 aa, HIV-1
TPRGPDRPEGI

SEQ ID NO: 7578 - protein, 11 aa, HIV-1
GERDRDRSIRL

SEQ ID NO: 7579 - protein, 11 aa, HIV-1
SIRLVNGSLAL

SEQ ID NO: 7580 - protein, 11 aa, HIV-1
RLVNGSLALIW

SEQ ID NO: 7581 - protein, 11 aa, HIV-1
GSLALIWDDLR

SEQ ID NO: 7582 - protein, 11 aa, HIV-1
ALIWDDLRSLC

SEQ ID NO: 7583 - protein, 11 aa, HIV-1
LIWDDLRSLCL

SEQ ID NO: 7584 - protein, 11 aa, HIV-1
IWDDLRSLCLF

SEQ ID NO: 7585 - protein, 11 aa, HIV-1
SLCLFSYHRLR

SEQ ID NO: 7586 - protein, 11 aa, HIV-1
CLFSYHRLRDL

SEQ ID NO: 7587 - protein, 11 aa, HIV-1
SYHRLRDLLLI

SEQ ID NO: 7588 - protein, 11 aa, HIV-1
RLRDLLLIVTR

SEQ ID NO: 7589 - protein, 11 aa, HIV-1
LLLIVTRIVEL

SEQ ID NO: 7590 - protein, 11 aa, HIV-1
LLIVTRIVELL

SEQ ID NO: 7591 - protein, 11 aa, HIV-1
IVTRIVELLGR

SEQ ID NO: 7592 - protein, 11 aa, HIV-1
VTRIVELLGRR

SEQ ID NO: 7593 - protein, 11 aa, HIV-1
ELLGRRGWEAL

SEQ ID NO: 7594 - protein, 11 aa, HIV-1
LLGRRGWEALK

SEQ ID NO: 7595 - protein, 11 aa, HIV-1
GWEALKYWWNL

SEQ ID NO: 7596 - protein, 11 aa, HIV-1
WEALKYWWNLL

SEQ ID NO: 7597 - protein, 11 aa, HIV-1
ALKYWWNLLQY

SEQ ID NO: 7598 - protein, 11 aa, HIV-1
LKYWWNLLQYW

SEQ ID NO: 7599 - protein, 11 aa, HIV-1
NLLQYWSQELK

SEQ ID NO: 7600 - protein, 11 aa, HIV-1
SQELKNSAVSL

SEQ ID NO: 7601 - protein, 11 aa, HIV-1
QELKNSAVSLL

SEQ ID NO: 7602 - protein, 11 aa, HIV-1
SAVSLLNATAI

SEQ ID NO: 7603 - protein, 11 aa, HIV-1
AVSLLNATAIA

SEQ ID NO: 7604 - protein, 11 aa, HIV-1
SLLNATAIAVA

SEQ ID NO: 7605 - protein, 11 aa, HIV-1
NATAIAVAEGT

SEQ ID NO: 7606 - protein, 11 aa, HIV-1
TAIAVAEGTDR

SEQ ID NO: 7607 - protein, 11 aa, HIV-1
AIAVAEGTDRV

SEQ ID NO: 7608 - protein, 11 aa, HIV-1
VAEGTDRVIEV

SEQ ID NO: 7609 - protein, 11 aa, HIV-1
AEGTDRVIEVV

SEQ ID NO: 7610 - protein, 11 aa, HIV-1
RVIEVVQGACR

SEQ ID NO: 7611 - protein, 11 aa, HIV-1
EVVQGACRAIR

SEQ ID NO: 7612 - protein, 11 aa, HIV-1
GACRAIRHIPR

SEQ ID NO: 7613 - protein, 11 aa, HIV-1
ACRAIRHIPRR

SEQ ID NO: 7614 - protein, 11 aa, HIV-1
RAIRHIPRRIR

SEQ ID NO: 7615 - protein, 11 aa, HIV-1
RRIRQGLERIL

SEQ ID NO: 7616 - protein, 11 aa, HIV-1
RIRQGLERILL

SEQ ID NO: 7617 - protein, 15 aa, HIV-1
ACRAIRHIPRRIRQG

SEQ ID NO: 7618 - protein, 9 aa, HIV-1
IRHIPRRIR

SEQ ID NO: 7619 - protein, 15 aa, HIV-1
ACVPTDPNPQEVVLV

SEQ ID NO: 7620 - protein, 9 aa, HIV-1
VPTDPNPQE

SEQ ID NO: 7621 - protein, 15 aa, HIV-1
AEEEVVIRSVNFTDN

SEQ ID NO: 7622 - protein, 9 aa, HIV-1
VVIRSVNFT

SEQ ID NO: 7623 - protein, 15 aa, HIV-1
AFFYKLDIIPIDNDT

SEQ ID NO: 7624 - protein, 9 aa, HIV-1
YKLDIIPID

SEQ ID NO: 7625 - protein, 15 aa, HIV-1
AGSTMGAASMTLTVQ

SEQ ID NO: 7626 - protein, 9 aa, HIV-1
MGAASMTLT

SEQ ID NO: 7627 - protein, 15 aa, HIV-1
AKTIIVQLNTSVEIN

SEQ ID NO: 7628 - protein, 9 aa, HIV-1
IVQLNTSVE

SEQ ID NO: 7629 - protein, 15 aa, HIV-1
AKTIIVQLNTSVEIN

SEQ ID NO: 7630 - protein, 9 aa, HIV-1
VQLNTSVEI

SEQ ID NO: 7631 - protein, 15 aa, HIV-1
AKWNNTLKQIASKLR

SEQ ID NO: 7632 - protein, 9 aa, HIV-1
NTLKQIASK

SEQ ID NO: 7633 - protein, 15 aa, HIV-1
AKWNNTLKQIASKLR

SEQ ID NO: 7634 - protein, 9 aa, HIV-1
TLKQIASKL

SEQ ID NO: 7635 - protein, 15 aa, HIV-1
AKWNNTLKQIASKLR

SEQ ID NO: 7636 - protein, 9 aa, HIV-1
WNNTLKQIA

SEQ ID NO: 7637 - protein, 15 aa, HIV-1
ALFLGFLGAAGSTMG

SEQ ID NO: 7638 - protein, 9 aa, HIV-1
FLGFLGAAG

SEQ ID NO: 7639 - protein, 15 aa, HIV-1
ALFLGFLGAAGSTMG

SEQ ID NO: 7640 - protein, 9 aa, HIV-1
FLGAAGSTM

SEQ ID NO: 7641 - protein, 15 aa, HIV-1
ALIWDDLRSLCLFSY

SEQ ID NO: 7642 - protein, 9 aa, HIV-1
WDDLRSLCL

SEQ ID NO: 7643 - protein, 15 aa, HIV-1
ALKYWWNLLQYWSQE

SEQ ID NO: 7644 - protein, 9 aa, HIV-1
LKYWWNLLQ

SEQ ID NO: 7645 - protein, 15 aa, HIV-1
ALKYWWNLLQYWSQE

SEQ ID NO: 7646 - protein, 9 aa, HIV-1
WWNLLQYWS

SEQ ID NO: 7647 - protein, 15 aa, HIV-1
ALKYWWNLLQYWSQE

SEQ ID NO: 7648 - protein, 9 aa, HIV-1
YWWNLLQYW

SEQ ID NO: 7649 - protein, 15 aa, HIV-1
AMYAPPISGQIRCSS

SEQ ID NO: 7650 - protein, 9 aa, HIV-1
YAPPISGQI

SEQ ID NO: 7651 - protein, 15 aa, HIV-1
AQQHLLQLTVWGIKQ

SEQ ID NO: 7652 - protein, 9 aa, HIV-1
LLQLTVWGI

SEQ ID NO: 7653 - protein, 15 aa, HIV-1
ARQLLSGIVQQQNNL

SEQ ID NO: 7654 - protein, 9 aa, HIV-1
LLSGIVQQQ

SEQ ID NO: 7655 - protein, 15 aa, HIV-1
ASLWNWFNITNWLWY

SEQ ID NO: 7656 - protein, 9 aa, HIV-1
LWNWFNITN

SEQ ID NO: 7657 - protein, 15 aa, HIV-1
ASLWNWFNITNWLWY

SEQ ID NO: 7658 - protein, 9 aa, HIV-1
WFNITNWLW

SEQ ID NO: 7659 - protein, 15 aa, HIV-1
ASLWNWFNITNWLWY

SEQ ID NO: 7660 - protein, 9 aa, HIV-1
WNWFNITNW

SEQ ID NO: 7661 - protein, 15 aa, HIV-1
ASMTLTVQARQLLSG

SEQ ID NO: 7662 - protein, 9 aa, HIV-1
LTVQARQLL

SEQ ID NO: 7663 - protein, 15 aa, HIV-1
ATAIAVAEGTDRVIE

SEQ ID NO: 7664 - protein, 9 aa, HIV-1
IAVAEGTDR

SEQ ID NO: 7665 - protein, 15 aa, HIV-1
ATEKLWVTVYYGVPV

SEQ ID NO: 7666 - protein, 9 aa, HIV-1
EKLWVTVYY

SEQ ID NO: 7667 - protein, 15 aa, HIV-1
ATHACVPTDPNPQEV

SEQ ID NO: 7668 - protein, 9 aa, HIV-1
VPTDPNPQE

SEQ ID NO: 7669 - protein, 15 aa, HIV-1
ATTTLFCASDAKAYD

SEQ ID NO: 7670 - protein, 9 aa, HIV-1
FCASDAKAY

SEQ ID NO: 7671 - protein, 15 aa, HIV-1
AVGIGALFLGFLGAA

SEQ ID NO: 7672 - protein, 9 aa, HIV-1
AVGIGALFL

SEQ ID NO: 7673 - protein, 15 aa, HIV-1
AVLSIVNRVRQGYSP

SEQ ID NO: 7674 - protein, 9 aa, HIV-1
LSIVNRVRQ

SEQ ID NO: 7675 - protein, 15 aa, HIV-1
AVPWNASWSNKSLEQ

SEQ ID NO: 7676 - protein, 9 aa, HIV-1
WNASWSNKS

SEQ ID NO: 7677 - protein, 15 aa, HIV-1
AVSLLNATAIAVAEG

SEQ ID NO: 7678 - protein, 9 aa, HIV-1
LLNATAIAV

SEQ ID NO: 7679 - protein, 15 aa, HIV-1
AYDTEVHNVWATHAC

SEQ ID NO: 7680 - protein, 9 aa, HIV-1
VHNVWATHA

SEQ ID NO: 7681 - protein, 15 aa, HIV-1
CGGEFFYCNSTQLFN

SEQ ID NO: 7682 - protein, 9 aa, HIV-1
FYCNSTQLF

SEQ ID NO: 7683 - protein, 15 aa, HIV-1
CLFSYHRLRDLLLIV

SEQ ID NO: 7684 - protein, 9 aa, HIV-1
YHRLRDLLL

SEQ ID NO: 7685 - protein, 15 aa, HIV-1
CNISRAKWNNTLKQI

SEQ ID NO: 7686 - protein, 9 aa, HIV-1
RAKWNNTLK

SEQ ID NO: 7687 - protein, 15 aa, HIV-1
CNNKTFNGTGPCTNV

SEQ ID NO: 7688 - protein, 9 aa, HIV-1
FNGTGPCTN

SEQ ID NO: 7689 - protein, 15 aa, HIV-1
CNSTQLFNSTWFNST

SEQ ID NO: 7690 - protein, 9 aa, HIV-1
LFNSTWFNS

SEQ ID NO: 7691 - protein, 15 aa, HIV-1
CNTSVITQACPKVSF

SEQ ID NO: 7692 - protein, 9 aa, HIV-1
ITQACPKVS

SEQ ID NO: 7693 - protein, 15 aa, HIV-1
CRAIRHIPRRIRQGL

SEQ ID NO: 7694 - protein, 9 aa, HIV-1
IRHIPRRIR

SEQ ID NO: 7695 - protein, 15 aa, HIV-1
CRIKQIINMWQKVGK

SEQ ID NO: 7696 - protein, 9 aa, HIV-1
IINMWQKVG

SEQ ID NO: 7697 - protein, 15 aa, HIV-1
CRIKQIINMWQKVGK

SEQ ID NO: 7698 - protein, 9 aa, HIV-1
IKQIINMWQ

SEQ ID NO: 7699 - protein, 15 aa, HIV-1
CSFNISTSIRGKVQK

SEQ ID NO: 7700 - protein, 9 aa, HIV-1
FNISTSIRG

SEQ ID NO: 7701 - protein, 15 aa, HIV-1
CSGKLICTTAVPWNA

SEQ ID NO: 7702 - protein, 9 aa, HIV-1
GKLICTTAV

SEQ ID NO: 7703 - protein, 15 aa, HIV-1
CSGKLICTTAVPWNA

SEQ ID NO: 7704 - protein, 9 aa, HIV-1
LICTTAVPW

SEQ ID NO: 7705 - protein, 15 aa, HIV-1
CSSNITGLLLTRDGG

SEQ ID NO: 7706 - protein, 9 aa, HIV-1
ITGLLLTRD

SEQ ID NO: 7707 - protein, 15 aa, HIV-1
CTDLKNDTNTNSSSG

SEQ ID NO: 7708 - protein, 9 aa, HIV-1
LKNDTNTNS

SEQ ID NO: 7709 - protein, 15 aa, HIV-1
CTHGIRPVVSTQLLL

SEQ ID NO: 7710 - protein, 9 aa, HIV-1
IRPVVSTQL

SEQ ID NO: 7711 - protein, 15 aa, HIV-1
CTRPNNNTRKRIRIQ

SEQ ID NO: 7712 - protein, 9 aa, HIV-1
PNNNTRKRI

SEQ ID NO: 7713 - protein, 15 aa, HIV-1
CTTAVPWNASWSNKS

SEQ ID NO: 7714 - protein, 9 aa, HIV-1
AVPWNASWS

SEQ ID NO: 7715 - protein, 15 aa, HIV-1
CTTAVPWNASWSNKS

SEQ ID NO: 7716 - protein, 9 aa, HIV-1
CTTAVPWNA

SEQ ID NO: 7717 - protein, 15 aa, HIV-1
CTTAVPWNASWSNKS

SEQ ID NO: 7718 - protein, 9 aa, HIV-1
TTAVPWNAS

SEQ ID NO: 7719 - protein, 15 aa, HIV-1
CTTAVPWNASWSNKS

SEQ ID NO: 7720 - protein, 9 aa, HIV-1
VPWNASWSN

SEQ ID NO: 7721 - protein, 15 aa, HIV-1
CVKLTPLCVSLKCTD

SEQ ID NO: 7722 - protein, 9 aa, HIV-1
LTPLCVSLK

SEQ ID NO: 7723 - protein, 15 aa, HIV-1
DDLRSLCLFSYHRLR

SEQ ID NO: 7724 - protein, 9 aa, HIV-1
LRSLCLFSY

SEQ ID NO: 7725 - protein, 15 aa, HIV-1
DIISLWDQSLKPCVK

SEQ ID NO: 7726 - protein, 9 aa, HIV-1
LWDQSLKPC

SEQ ID NO: 7727 - protein, 15 aa, HIV-1
DKWASLWNWFNITNW

SEQ ID NO: 7728 - protein, 9 aa, HIV-1
WASLWNWFN

SEQ ID NO: 7729 - protein, 15 aa, HIV-1
DLLLIVTRIVELLGR

SEQ ID NO: 7730 - protein, 9 aa, HIV-1
IVTRIVELL

SEQ ID NO: 7731 - protein, 15 aa, HIV-1
DLLLIVTRIVELLGR

SEQ ID NO: 7732 - protein, 9 aa, HIV-1
LIVTRIVEL

SEQ ID NO: 7733 - protein, 15 aa, HIV-1
DLLLIVTRIVELLGR

SEQ ID NO: 7734 - protein, 9 aa, HIV-1
LLIVTRIVE

SEQ ID NO: 7735 - protein, 15 aa, HIV-1
DLRSLCLFSYHRLRD

SEQ ID NO: 7736 - protein, 9 aa, HIV-1
LRSLCLFSY

SEQ ID NO: 7737 - protein, 15 aa, HIV-1
DMRDNWRSELYKYKV

SEQ ID NO: 7738 - protein, 9 aa, HIV-1
WRSELYKYK

SEQ ID NO: 7739 - protein, 15 aa, HIV-1
DNAKTIIVQLNTSVE

SEQ ID NO: 7740 - protein, 9 aa, HIV-1
IIVQLNTSV

SEQ ID NO: 7741 - protein, 15 aa, HIV-1
DNAKTIIVQLNTSVE

SEQ ID NO: 7742 - protein, 9 aa, HIV-1
TIIVQLNTS

SEQ ID NO: 7743 - protein, 15 aa, HIV-1
DNWRSELYKYKVVKI

SEQ ID NO: 7744 - protein, 9 aa, HIV-1
WRSELYKYK

SEQ ID NO: 7745 - protein, 15 aa, HIV-1
DRDRSIRLVNGSLAL

SEQ ID NO: 7746 - protein, 9 aa, HIV-1
IRLVNGSLA

SEQ ID NO: 7747 - protein, 15 aa, HIV-1
DREINNYTSLIHSLI

SEQ ID NO: 7748 - protein, 9 aa, HIV-1
INNYTSLIH

SEQ ID NO: 7749 - protein, 15 aa, HIV-1
DRSIRLVNGSLALIW

SEQ ID NO: 7750 - protein, 9 aa, HIV-1
IRLVNGSLA

SEQ ID NO: 7751 - protein, 15 aa, HIV-1
DRSIRLVNGSLALIW

SEQ ID NO: 7752 - protein, 9 aa, HIV-1
LVNGSLALI

SEQ ID NO: 7753 - protein, 15 aa, HIV-1
DRVIEVVQGACRAIR

SEQ ID NO: 7754 - protein, 9 aa, HIV-1
VVQGACRAI

SEQ ID NO: 7755 - protein, 15 aa, HIV-1
DTEVHNVWATHACVP

SEQ ID NO: 7756 - protein, 9 aa, HIV-1
VHNVWATHA

SEQ ID NO: 7757 - protein, 15 aa, HIV-1
DTTSYKLTSCNTSVI

SEQ ID NO: 7758 - protein, 9 aa, HIV-1
SYKLTSCNT

SEQ ID NO: 7759 - protein, 15 aa, HIV-1
DTTSYKLTSCNTSVI

SEQ ID NO: 7760 - protein, 9 aa, HIV-1
YKLTSCNTS

SEQ ID NO: 7761 - protein, 15 aa, HIV-1
EALKYWWNLLQYWSQ

SEQ ID NO: 7762 - protein, 9 aa, HIV-1
LKYWWNLLQ

SEQ ID NO: 7763 - protein, 15 aa, HIV-1
EALKYWWNLLQYWSQ

SEQ ID NO: 7764 - protein, 9 aa, HIV-1
WWNLLQYWS

SEQ ID NO: 7765 - protein, 15 aa, HIV-1
EALKYWWNLLQYWSQ

SEQ ID NO: 7766 - protein, 9 aa, HIV-1
YWWNLLQYW

SEQ ID NO: 7767 - protein, 15 aa, HIV-1
EAQQHLLQLTVWGIK

SEQ ID NO: 7768 - protein, 9 aa, HIV-1
LLQLTVWGI

SEQ ID NO: 7769 - protein, 15 aa, HIV-1
EATTTLFCASDAKAY

SEQ ID NO: 7770 - protein, 9 aa, HIV-1
LFCASDAKA

SEQ ID NO: 7771 - protein, 15 aa, HIV-1
EDIISLWDQSLKPCV

SEQ ID NO: 7772 - protein, 9 aa, HIV-1
LWDQSLKPC

SEQ ID NO: 7773 - protein, 15 aa, HIV-1
EEEVVIRSVNFTDNA

SEQ ID NO: 7774 - protein, 9 aa, HIV-1
VVIRSVNFT

SEQ ID NO: 7775 - protein, 15 aa, HIV-1
EEVVIRSVNFTDNAK

SEQ ID NO: 7776 - protein, 9 aa, HIV-1
VVIRSVNFT

SEQ ID NO: 7777 - protein, 15 aa, HIV-1
EFFYCNSTQLFNSTW

SEQ ID NO: 7778 - protein, 9 aa, HIV-1
FYCNSTQLF

SEQ ID NO: 7779 - protein, 15 aa, HIV-1
EIKNCSFNISTSIRG

SEQ ID NO: 7780 - protein, 9 aa, HIV-1
IKNCSFNIS

SEQ ID NO: 7781 - protein, 15 aa, HIV-1
EIKNCSFNISTSIRG

SEQ ID NO: 7782 - protein, 9 aa, HIV-1
SFNISTSIR

SEQ ID NO: 7783 - protein, 15 aa, HIV-1
EINCTRPNNNTRKRI

SEQ ID NO: 7784 - protein, 9 aa, HIV-1
RPNNNTRKR

SEQ ID NO: 7785 - protein, 15 aa, HIV-1
EINCTRPNNNTRKRI

SEQ ID NO: 7786 - protein, 9 aa, HIV-1
TRPNNNTRK

SEQ ID NO: 7787 - protein, 15 aa, HIV-1
EINNYTSLIHSLIEE

SEQ ID NO: 7788 - protein, 9 aa, HIV-1
YTSLIHSLI

SEQ ID NO: 7789 - protein, 15 aa, HIV-1
EKGEIKNCSFNISTS

SEQ ID NO: 7790 - protein, 9 aa, HIV-1
IKNCSFNIS

SEQ ID NO: 7791 - protein, 15 aa, HIV-1
EKRAVGIGALFLGFL

SEQ ID NO: 7792 - protein, 9 aa, HIV-1
VGIGALFLG

SEQ ID NO: 7793 - protein, 15 aa, HIV-1
EKYQHLWRWGWRWGT

SEQ ID NO: 7794 - protein, 9 aa, HIV-1
LWRWGWRWG

SEQ ID NO: 7795 - protein, 15 aa, HIV-1
EKYQHLWRWGWRWGT

SEQ ID NO: 7796 - protein, 9 aa, HIV-1
QHLWRWGWR

SEQ ID NO: 7797 - protein, 15 aa, HIV-1
EKYQHLWRWGWRWGT

SEQ ID NO: 7798 - protein, 9 aa, HIV-1
YQHLWRWGW

SEQ ID NO: 7799 - protein, 15 aa, HIV-1
ELDKWASLWNWFNIT

SEQ ID NO: 7800 - protein, 9 aa, HIV-1
WASLWNWFN

SEQ ID NO: 7801 - protein, 15 aa, HIV-1
ELKNSAVSLLNATAI

SEQ ID NO: 7802 - protein, 9 aa, HIV-1
LKNSAVSLL

SEQ ID NO: 7803 - protein, 15 aa, HIV-1
ELLELDKWASLWNWF

SEQ ID NO: 7804 - protein, 9 aa, HIV-1
LDKWASLWN

SEQ ID NO: 7805 - protein, 15 aa, HIV-1
ELYKYKVVKIEPLGV

SEQ ID NO: 7806 - protein, 9 aa, HIV-1
YKVVKIEPL

SEQ ID NO: 7807 - protein, 15 aa, HIV-1
ELYKYKVVKIEPLGV

SEQ ID NO: 7808 - protein, 9 aa, HIV-1
YKYKVVKIE

SEQ ID NO: 7809 - protein, 15 aa, HIV-1
ENFNMWKNDMVEQMH

SEQ ID NO: 7810 - protein, 9 aa, HIV-1
FNMWKNDMV

SEQ ID NO: 7811 - protein, 15 aa, HIV-1
ENFNMWKNDMVEQMH

SEQ ID NO: 7812 - protein, 9 aa, HIV-1
WKNDMVEQM

SEQ ID NO: 7813 - protein, 15 aa, HIV-1
EPIPIHYCAPAGFAI

SEQ ID NO: 7814 - protein, 9 aa, HIV-1
HYCAPAGFA

SEQ ID NO: 7815 - protein, 15 aa, HIV-1
EPLGVAPTKAKRRVV

SEQ ID NO: 7816 - protein, 9 aa, HIV-1
VAPTKAKRR

SEQ ID NO: 7817 - protein, 15 aa, HIV-1
EQELLELDKWASLWN

SEQ ID NO: 7818 - protein, 9 aa, HIV-1
LLELDKWAS

SEQ ID NO: 7819 - protein, 15 aa, HIV-1
EQFGNNKTIIFKQSS

SEQ ID NO: 7820 - protein, 9 aa, HIV-1
FGNNKTIIF

SEQ ID NO: 7821 - protein, 15 aa, HIV-1
EQIWNHTTWMEWDRE

SEQ ID NO: 7822 - protein, 9 aa, HIV-1
IWNHTTWME

SEQ ID NO: 7823 - protein, 15 aa, HIV-1
EVHNVWATHACVPTD

SEQ ID NO: 7824 - protein, 9 aa, HIV-1
WATHACVPT

SEQ ID NO: 7825 - protein, 15 aa, HIV-1
EVVIRSVNFTDNAKT

SEQ ID NO: 7826 - protein, 9 aa, HIV-1
VVIRSVNFT

SEQ ID NO: 7827 - protein, 15 aa, HIV-1
EVVLVNVTENFNMWK

SEQ ID NO: 7828 - protein, 9 aa, HIV-1
LVNVTENFN

SEQ ID NO: 7829 - protein, 15 aa, HIV-1
EVVQGACRAIRHIPR

SEQ ID NO: 7830 - protein, 9 aa, HIV-1
VVQGACRAI

SEQ ID NO: 7831 - protein, 15 aa, HIV-1
EWDREINNYTSLIHS

SEQ ID NO: 7832 - protein, 9 aa, HIV-1
INNYTSLIH

SEQ ID NO: 7833 - protein, 15 aa, HIV-1
EYAFFYKLDIIPIDN

SEQ ID NO: 7834 - protein, 9 aa, HIV-1
YKLDIIPID

SEQ ID NO: 7835 - protein, 15 aa, HIV-1
FAVLSIVNRVRQGYS

SEQ ID NO: 7836 - protein, 9 aa, HIV-1
LSIVNRVRQ

SEQ ID NO: 7837 - protein, 15 aa, HIV-1
FAVLSIVNRVRQGYS

SEQ ID NO: 7838 - protein, 9 aa, HIV-1
VLSIVNRVR

SEQ ID NO: 7839 - protein, 15 aa, HIV-1
FFYKLDIIPIDNDTT

SEQ ID NO: 7840 - protein, 9 aa, HIV-1
YKLDIIPID

SEQ ID NO: 7841 - protein, 15 aa, HIV-1
FGNNKTIIFKQSSGG

SEQ ID NO: 7842 - protein, 9 aa, HIV-1
FGNNKTIIF

SEQ ID NO: 7843 - protein, 15 aa, HIV-1
FIMIVGGLVGLRIVF

SEQ ID NO: 7844 - protein, 9 aa, HIV-1
IMIVGGLVG

SEQ ID NO: 7845 - protein, 15 aa, HIV-1
FIMIVGGLVGLRIVF

SEQ ID NO: 7846 - protein, 9 aa, HIV-1
IVGGLVGLR

SEQ ID NO: 7847 - protein, 15 aa, HIV-1
FIMIVGGLVGLRIVF

SEQ ID NO: 7848 - protein, 9 aa, HIV-1
VGGLVGLRI

SEQ ID NO: 7849 - protein, 15 aa, HIV-1
FLGFLGAAGSTMGAA

SEQ ID NO: 7850 - protein, 9 aa, HIV-1
FLGAAGSTM

SEQ ID NO: 7851 - protein, 15 aa, HIV-1
FLGFLGAAGSTMGAA

SEQ ID NO: 7852 - protein, 9 aa, HIV-1
LGAAGSTMG

SEQ ID NO: 7853 - protein, 15 aa, HIV-1
FLGAAGSTMGAASMT

SEQ ID NO: 7854 - protein, 9 aa, HIV-1
LGAAGSTMG

SEQ ID NO: 7855 - protein, 15 aa, HIV-1
FNGTGPCTNVSTVQC

SEQ ID NO: 7856 - protein, 9 aa, HIV-1
FNGTGPCTN

SEQ ID NO: 7857 - protein, 15 aa, HIV-1
FNISTSIRGKVQKEY

SEQ ID NO: 7858 - protein, 9 aa, HIV-1
FNISTSIRG

SEQ ID NO: 7859 - protein, 15 aa, HIV-1
FNITNWLWYIKLFIM

SEQ ID NO: 7860 - protein, 9 aa, HIV-1
FNITNWLWY

SEQ ID NO: 7861 - protein, 15 aa, HIV-1
FNITNWLWYIKLFIM

SEQ ID NO: 7862 - protein, 9 aa, HIV-1
ITNWLWYIK

SEQ ID NO: 7863 - protein, 15 aa, HIV-1
FNMWKNDMVEQMHED

SEQ ID NO: 7864 - protein, 9 aa, HIV-1
FNMWKNDMV

SEQ ID NO: 7865 - protein, 15 aa, HIV-1
FNMWKNDMVEQMHED

SEQ ID NO: 7866 - protein, 9 aa, HIV-1
WKNDMVEQM

SEQ ID NO: 7867 - protein, 15 aa, HIV-1
FNSTWFNSTWSTEGS

SEQ ID NO: 7868 - protein, 9 aa, HIV-1
FNSTWSTEG

SEQ ID NO: 7869 - protein, 15 aa, HIV-1
FNSTWFNSTWSTEGS

SEQ ID NO: 7870 - protein, 9 aa, HIV-1
WFNSTWSTE

SEQ ID NO: 7871 - protein, 15 aa, HIV-1
FNSTWSTEGSNNTEG

SEQ ID NO: 7872 - protein, 9 aa, HIV-1
FNSTWSTEG

SEQ ID NO: 7873 - protein, 15 aa, HIV-1
FNSTWSTEGSNNTEG

SEQ ID NO: 7874 - protein, 9 aa, HIV-1
WSTEGSNNT

SEQ ID NO: 7875 - protein, 15 aa, HIV-1
FQTHLPTPRGPDRPE

SEQ ID NO: 7876 - protein, 9 aa, HIV-1
FQTHLPTPR

SEQ ID NO: 7877 - protein, 15 aa, HIV-1
FSYHRLRDLLLIVTR

SEQ ID NO: 7878 - protein, 9 aa, HIV-1
LRDLLLIVT

SEQ ID NO: 7879 - protein, 15 aa, HIV-1
FVTIGKIGNMRQAHC

SEQ ID NO: 7880 - protein, 9 aa, HIV-1
IGKIGNMRQ

SEQ ID NO: 7881 - protein, 15 aa, HIV-1
GACRAIRHIPRRIRQ

SEQ ID NO: 7882 - protein, 9 aa, HIV-1
IRHIPRRIR

SEQ ID NO: 7883 - protein, 15 aa, HIV-1
GALFLGFLGAAGSTM

SEQ ID NO: 7884 - protein, 9 aa, HIV-1
FLGFLGAAG

SEQ ID NO: 7885 - protein, 15 aa, HIV-1
GALFLGFLGAAGSTM

SEQ ID NO: 7886 - protein, 9 aa, HIV-1
LGFLGAAGS

SEQ ID NO: 7887 - protein, 15 aa, HIV-1
GCSGKLICTTAVPWN

SEQ ID NO: 7888 - protein, 9 aa, HIV-1
GKLICTTAV

SEQ ID NO: 7889 - protein, 15 aa, HIV-1
GCSGKLICTTAVPWN

SEQ ID NO: 7890 - protein, 9 aa, HIV-1
LICTTAVPW

SEQ ID NO: 7891 - protein, 15 aa, HIV-1
GDMRDNWRSELYKYK

SEQ ID NO: 7892 - protein, 9 aa, HIV-1
RDNWRSELY

SEQ ID NO: 7893 - protein, 15 aa, HIV-1
GEFFYCNSTQLFNST

SEQ ID NO: 7894 - protein, 9 aa, HIV-1
FYCNSTQLF

SEQ ID NO: 7895 - protein, 15 aa, HIV-1
GEIKNCSFNISTSIR

SEQ ID NO: 7896 - protein, 9 aa, HIV-1
IKNCSFNIS

SEQ ID NO: 7897 - protein, 15 aa, HIV-1
GFAILKCNNKTFNGT

SEQ ID NO: 7898 - protein, 9 aa, HIV-1
LKCNNKTFN

SEQ ID NO: 7899 - protein, 15 aa, HIV-1
GFLGAAGSTMGAASM

SEQ ID NO: 7900 - protein, 9 aa, HIV-1
LGAAGSTMG

SEQ ID NO: 7901 - protein, 15 aa, HIV-1
GGEFFYCNSTQLFNS

SEQ ID NO: 7902 - protein, 9 aa, HIV-1
FYCNSTQLF

SEQ ID NO: 7903 - protein, 15 aa, HIV-1
GGLVGLRIVFAVLSI

SEQ ID NO: 7904 - protein, 9 aa, HIV-1
LRIVFAVLS

SEQ ID NO: 7905 - protein, 15 aa, HIV-1
GGLVGLRIVFAVLSI

SEQ ID NO: 7906 - protein, 9 aa, HIV-1
VGLRIVFAV

SEQ ID NO: 7907 - protein, 15 aa, HIV-1
GIGALFLGFLGAAGS

SEQ ID NO: 7908 - protein, 9 aa, HIV-1
FLGFLGAAG

SEQ ID NO: 7909 - protein, 15 aa, HIV-1
GIKQLQARILAVERY

SEQ ID NO: 7910 - protein, 9 aa, HIV-1
IKQLQARIL

SEQ ID NO: 7911 - protein, 15 aa, HIV-1
GIRPVVSTQLLLNGS

SEQ ID NO: 7912 - protein, 9 aa, HIV-1
IRPVVSTQL

SEQ ID NO: 7913 - protein, 15 aa, HIV-1
GIVQQQNNLLRAIEA

SEQ ID NO: 7914 - protein, 9 aa, HIV-1
VQQQNNLLR

SEQ ID NO: 7915 - protein, 15 aa, HIV-1
GKAMYAPPISGQIRC

SEQ ID NO: 7916 - protein, 9 aa, HIV-1
YAPPISGQI

SEQ ID NO: 7917 - protein, 15 aa, HIV-1
GKLICTTAVPWNASW

SEQ ID NO: 7918 - protein, 9 aa, HIV-1
ICTTAVPWN

SEQ ID NO: 7919 - protein, 15 aa, HIV-1
GKLICTTAVPWNASW

SEQ ID NO: 7920 - protein, 9 aa, HIV-1
LICTTAVPW

SEQ ID NO: 7921 - protein, 15 aa, HIV-1
GLRIVFAVLSIVNRV

SEQ ID NO: 7922 - protein, 9 aa, HIV-1
FAVLSIVNR

SEQ ID NO: 7923 - protein, 15 aa, HIV-1
GLRIVFAVLSIVNRV

SEQ ID NO: 7924 - protein, 9 aa, HIV-1
LRIVFAVLS

SEQ ID NO: 7925 - protein, 15 aa, HIV-1
GLVGLRIVFAVLSIV

SEQ ID NO: 7926 - protein, 9 aa, HIV-1
LRIVFAVLS

SEQ ID NO: 7927 - protein, 15 aa, HIV-1
GLVGLRIVFAVLSIV

SEQ ID NO: 7928 - protein, 9 aa, HIV-1
VGLRIVFAV

SEQ ID NO: 7929 - protein, 15 aa, HIV-1
GMLMICSATEKLWVT

SEQ ID NO: 7930 - protein, 9 aa, HIV-1
MICSATEKL

SEQ ID NO: 7931 - protein, 15 aa, HIV-1
GRAFVTIGKIGNMRQ

SEQ ID NO: 7932 - protein, 9 aa, HIV-1
FVTIGKIGN

SEQ ID NO: 7933 - protein, 15 aa, HIV-1
GSLALIWDDLRSLCL

SEQ ID NO: 7934 - protein, 9 aa, HIV-1
LIWDDLRSL

SEQ ID NO: 7935 - protein, 15 aa, HIV-1
GSTMGAASMTLTVQA

SEQ ID NO: 7936 - protein, 9 aa, HIV-1
MGAASMTLT

SEQ ID NO: 7937 - protein, 15 aa, HIV-1
GTMLLGMLMICSATE

SEQ ID NO: 7938 - protein, 9 aa, HIV-1
LLGMLMICS

SEQ ID NO: 7939 - protein, 15 aa, HIV-1
GVAPTKAKRRVVQRE

SEQ ID NO: 7940 - protein, 9 aa, HIV-1
PTKAKRRVV

SEQ ID NO: 7941 - protein, 15 aa, HIV-1
GVAPTKAKRRVVQRE

SEQ ID NO: 7942 - protein, 9 aa, HIV-1
VAPTKAKRR

SEQ ID NO: 7943 - protein, 15 aa, HIV-1
GVPVWKEATTTLFCA

SEQ ID NO: 7944 - protein, 9 aa, HIV-1
WKEATTTLF

SEQ ID NO: 7945 - protein, 15 aa, HIV-1
GWEALKYWWNLLQYW

SEQ ID NO: 7946 - protein, 9 aa, HIV-1
LKYWWNLLQ

SEQ ID NO: 7947 - protein, 15 aa, HIV-1
GWRWGTMLLGMLMIC

SEQ ID NO: 7948 - protein, 9 aa, HIV-1
WGTMLLGML

SEQ ID NO: 7949 - protein, 15 aa, HIV-1
GWRWGTMLLGMLMIC

SEQ ID NO: 7950 - protein, 9 aa, HIV-1
WRWGTMLLG

SEQ ID NO: 7951 - protein, 15 aa, HIV-1
GYSPLSFQTHLPTPR

SEQ ID NO: 7952 - protein, 9 aa, HIV-1
LSFQTHLPT

SEQ ID NO: 7953 - protein, 15 aa, HIV-1
GYSPLSFQTHLPTPR

SEQ ID NO: 7954 - protein, 9 aa, HIV-1
YSPLSFQTH

SEQ ID NO: 7955 - protein, 15 aa, HIV-1
GAAGSTMGAASMTLT

SEQ ID NO: 7956 - protein, 9 aa, HIV-1
STMGAASMT

SEQ ID NO: 7957 - protein, 15 aa, HIV-1
GAAGSTMGAASMTLT

SEQ ID NO: 7958 - protein, 9 aa, HIV-1
TMGAASMTL

SEQ ID NO: 7959 - protein, 15 aa, HIV-1
GAASMTLTVQARQLL

SEQ ID NO: 7960 - protein, 9 aa, HIV-1
TLTVQARQL

SEQ ID NO: 7961 - protein, 15 aa, HIV-1
HACVPTDPNPQEVVL

SEQ ID NO: 7962 - protein, 9 aa, HIV-1
VPTDPNPQE

SEQ ID NO: 7963 - protein, 15 aa, HIV-1
HCNISRAKWNNTLKQ

SEQ ID NO: 7964 - protein, 9 aa, HIV-1
RAKWNNTLK

SEQ ID NO: 7965 - protein, 15 aa, HIV-1
HEDIISLWDQSLKPC

SEQ ID NO: 7966 - protein, 9 aa, HIV-1
IISLWDQSL

SEQ ID NO: 7967 - protein, 15 aa, HIV-1
HEDIISLWDQSLKPC

SEQ ID NO: 7968 - protein, 9 aa, HIV-1
ISLWDQSLK

SEQ ID NO: 7969 - protein, 15 aa, HIV-1
HGIRPVVSTQLLLNG

SEQ ID NO: 7970 - protein, 9 aa, HIV-1
IRPVVSTQL

SEQ ID NO: 7971 - protein, 15 aa, HIV-1
HLLQLTVWGIKQLQA

SEQ ID NO: 7972 - protein, 9 aa, HIV-1
LLQLTVWGI

SEQ ID NO: 7973 - protein, 15 aa, HIV-1
HLWRWGWRWGTMLLG

SEQ ID NO: 7974 - protein, 9 aa, HIV-1
GWRWGTMLL

SEQ ID NO: 7975 - protein, 15 aa, HIV-1
HLWRWGWRWGTMLLG

SEQ ID NO: 7976 - protein, 9 aa, HIV-1
LWRWGWRWG

SEQ ID NO: 7977 - protein, 15 aa, HIV-1
HLWRWGWRWGTMLLG

SEQ ID NO: 7978 - protein, 9 aa, HIV-1
WGWRWGTML

SEQ ID NO: 7979 - protein, 15 aa, HIV-1
HNVWATHACVPTDPN

SEQ ID NO: 7980 - protein, 9 aa, HIV-1
WATHACVPT

SEQ ID NO: 7981 - protein, 15 aa, HIV-1
HRLRDLLLIVTRIVE

SEQ ID NO: 7982 - protein, 9 aa, HIV-1
LLLIVTRIV

SEQ ID NO: 7983 - protein, 15 aa, HIV-1
HRLRDLLLIVTRIVE

SEQ ID NO: 7984 - protein, 9 aa, HIV-1
LRDLLLIVT

SEQ ID NO: 7985 - protein, 15 aa, HIV-1
HTTWMEWDREINNYT

SEQ ID NO: 7986 - protein, 9 aa, HIV-1
MEWDREINN

SEQ ID NO: 7987 - protein, 15 aa, HIV-1
IASKLREQFGNNKTI

SEQ ID NO: 7988 - protein, 9 aa, HIV-1
LREQFGNNK

SEQ ID NO: 7989 - protein, 15 aa, HIV-1
ICTTAVPWNASWSNK

SEQ ID NO: 7990 - protein, 9 aa, HIV-1
VPWNASWSN

SEQ ID NO: 7991 - protein, 15 aa, HIV-1
IEAQQHLLQLTVWGI

SEQ ID NO: 7992 - protein, 9 aa, HIV-1
AQQHLLQLT

SEQ ID NO: 7993 - protein, 15 aa, HIV-1
IEPLGVAPTKAKRRV

SEQ ID NO: 7994 - protein, 9 aa, HIV-1
VAPTKAKRR

SEQ ID NO: 7995 - protein, 15 aa, HIV-1
IEVVQGACRAIRHIP

SEQ ID NO: 7996 - protein, 9 aa, HIV-1
VVQGACRAI

SEQ ID NO: 7997 - protein, 15 aa, HIV-1
IGALFLGFLGAAGST

SEQ ID NO: 7998 - protein, 9 aa, HIV-1
FLGFLGAAG

SEQ ID NO: 7999 - protein, 15 aa, HIV-1
IGALFLGFLGAAGST

SEQ ID NO: 8000 - protein, 9 aa, HIV-1
LGFLGAAGS

SEQ ID NO: 8001 - protein, 15 aa, HIV-1
IHYCAPAGFAILKCN

SEQ ID NO: 8002 - protein, 9 aa, HIV-1
YCAPAGFAI

SEQ ID NO: 8003 - protein, 15 aa, HIV-1
IIFKQSSGGDPEIVT

SEQ ID NO: 8004 - protein, 9 aa, HIV-1
FKQSSGGDP

SEQ ID NO: 8005 - protein, 15 aa, HIV-1
IINMWQKVGKAMYAP

SEQ ID NO: 8006 - protein, 9 aa, HIV-1
INMWQKVGK

SEQ ID NO: 8007 - protein, 15 aa, HIV-1
IINMWQKVGKAMYAP

SEQ ID NO: 8008 - protein, 9 aa, HIV-1
MWQKVGKAM

SEQ ID NO: 8009 - protein, 15 aa, HIV-1
IINMWQKVGKAMYAP

SEQ ID NO: 8010 - protein, 9 aa, HIV-1
WQKVGKAMY

SEQ ID NO: 8011 - protein, 15 aa, HIV-1
IISLWDQSLKPCVKL

SEQ ID NO: 8012 - protein, 9 aa, HIV-1
LWDQSLKPC

SEQ ID NO: 8013 - protein, 15 aa, HIV-1
IIVQLNTSVEINCTR

SEQ ID NO: 8014 - protein, 9 aa, HIV-1
IVQLNTSVE

SEQ ID NO: 8015 - protein, 15 aa, HIV-1
IIVQLNTSVEINCTR

SEQ ID NO: 8016 - protein, 9 aa, HIV-1
VQLNTSVEI

SEQ ID NO: 8017 - protein, 15 aa, HIV-1
IKLFIMIVGGLVGLR

SEQ ID NO: 8018 - protein, 9 aa, HIV-1
FIMIVGGLV

SEQ ID NO: 8019 - protein, 15 aa, HIV-1
IKLFIMIVGGLVGLR

SEQ ID NO: 8020 - protein, 9 aa, HIV-1
IKLFIMIVG

SEQ ID NO: 8021 - protein, 15 aa, HIV-1
IKLFIMIVGGLVGLR

SEQ ID NO: 8022 - protein, 9 aa, HIV-1
IMIVGGLVG

SEQ ID NO: 8023 - protein, 15 aa, HIV-1
IKNCSFNISTSIRGK

SEQ ID NO: 8024 - protein, 9 aa, HIV-1
FNISTSIRG

SEQ ID NO: 8025 - protein, 15 aa, HIV-1
IKNCSFNISTSIRGK

SEQ ID NO: 8026 - protein, 9 aa, HIV-1
IKNCSFNIS

SEQ ID NO: 8027 - protein, 15 aa, HIV-1
IKQIINMWQKVGKAM

SEQ ID NO: 8028 - protein, 9 aa, HIV-1
IINMWQKVG

SEQ ID NO: 8029 - protein, 15 aa, HIV-1
IKQIINMWQKVGKAM

SEQ ID NO: 8030 - protein, 9 aa, HIV-1
INMWQKVGK

SEQ ID NO: 8031 - protein, 15 aa, HIV-1
IKQLQARILAVERYL

SEQ ID NO: 8032 - protein, 9 aa, HIV-1
IKQLQARIL

SEQ ID NO: 8033 - protein, 15 aa, HIV-1
IMEKGEIKNCSFNIS

SEQ ID NO: 8034 - protein, 9 aa, HIV-1
EKGEIKNCS

SEQ ID NO: 8035 - protein, 15 aa, HIV-1
IMIVGGLVGLRIVFA

SEQ ID NO: 8036 - protein, 9 aa, HIV-1
IMIVGGLVG

SEQ ID NO: 8037 - protein, 15 aa, HIV-1
IMIVGGLVGLRIVFA

SEQ ID NO: 8038 - protein, 9 aa, HIV-1
IVGGLVGLR

SEQ ID NO: 8039 - protein, 15 aa, HIV-1
IMIVGGLVGLRIVFA

SEQ ID NO: 8040 - protein, 9 aa, HIV-1
VGGLVGLRI

SEQ ID NO: 8041 - protein, 15 aa, HIV-1
INCTRPNNNTRKRIR

SEQ ID NO: 8042 - protein, 9 aa, HIV-1
PNNNTRKRI

SEQ ID NO: 8043 - protein, 15 aa, HIV-1
INCTRPNNNTRKRIR

SEQ ID NO: 8044 - protein, 9 aa, HIV-1
TRPNNNTRK

SEQ ID NO: 8045 - protein, 15 aa, HIV-1
INMWQKVGKAMYAPP

SEQ ID NO: 8046 - protein, 9 aa, HIV-1
MWQKVGKAM

SEQ ID NO: 8047 - protein, 15 aa, HIV-1
INMWQKVGKAMYAPP

SEQ ID NO: 8048 - protein, 9 aa, HIV-1
WQKVGKAMY

SEQ ID NO: 8049 - protein, 15 aa, HIV-1
INNYTSLIHSLIEES

SEQ ID NO: 8050 - protein, 9 aa, HIV-1
YTSLIHSLI

SEQ ID NO: 8051 - protein, 15 aa, HIV-1
IPIHYCAPAGFAILK

SEQ ID NO: 8052 - protein, 9 aa, HIV-1
YCAPAGFAI

SEQ ID NO: 8053 - protein, 15 aa, HIV-1
IQRGPGRAFVTIGKI

SEQ ID NO: 8054 - protein, 9 aa, HIV-1
IQRGPGRAF

SEQ ID NO: 8055 - protein, 15 aa, HIV-1
IRCSSNITGLLLTRD

SEQ ID NO: 8056 - protein, 9 aa, HIV-1
IRCSSNITG

SEQ ID NO: 8057 - protein, 15 aa, HIV-1
IRIQRGPGRAFVTIG

SEQ ID NO: 8058 - protein, 9 aa, HIV-1
IQRGPGRAF

SEQ ID NO: 8059 - protein, 15 aa, HIV-1
IRIQRGPGRAFVTIG

SEQ ID NO: 8060 - protein, 9 aa, HIV-1
IRIQRGPGR

SEQ ID NO: 8061 - protein, 15 aa, HIV-1
IRLVNGSLALIWDDL

SEQ ID NO: 8062 - protein, 9 aa, HIV-1
IRLVNGSLA

SEQ ID NO: 8063 - protein, 15 aa, HIV-1
IRLVNGSLALIWDDL

SEQ ID NO: 8064 - protein, 9 aa, HIV-1
LVNGSLALI

SEQ ID NO: 8065 - protein, 15 aa, HIV-1
IRPVVSTQLLLNGSL

SEQ ID NO: 8066 - protein, 9 aa, HIV-1
IRPVVSTQL

SEQ ID NO: 8067 - protein, 15 aa, HIV-1
ISLWDQSLKPCVKLT

SEQ ID NO: 8068 - protein, 9 aa, HIV-1
LWDQSLKPC

SEQ ID NO: 8069 - protein, 15 aa, HIV-1
ISRAKWNNTLKQIAS

SEQ ID NO: 8070 - protein, 9 aa, HIV-1
RAKWNNTLK

SEQ ID NO: 8071 - protein, 15 aa, HIV-1
ISRAKWNNTLKQIAS

SEQ ID NO: 8072 - protein, 9 aa, HIV-1
WNNTLKQIA

SEQ ID NO: 8073 - protein, 15 aa, HIV-1
ITGLLLTRDGGNSNN

SEQ ID NO: 8074 - protein, 9 aa, HIV-1
ITGLLLTRD

SEQ ID NO: 8075 - protein, 15 aa, HIV-1
ITNWLWYIKLFIMIV

SEQ ID NO: 8076 - protein, 9 aa, HIV-1
ITNWLWYIK

SEQ ID NO: 8077 - protein, 15 aa, HIV-1
ITNWLWYIKLFIMIV

SEQ ID NO: 8078 - protein, 9 aa, HIV-1
LWYIKLFIM

SEQ ID NO: 8079 - protein, 15 aa, HIV-1
ITNWLWYIKLFIMIV

SEQ ID NO: 8080 - protein, 9 aa, HIV-1
WYIKLFIMI

SEQ ID NO: 8081 - protein, 15 aa, HIV-1
ITQACPKVSFEPIPI

SEQ ID NO: 8082 - protein, 9 aa, HIV-1
ITQACPKVS

SEQ ID NO: 8083 - protein, 15 aa, HIV-1
IVELLGRRGWEALKY

SEQ ID NO: 8084 - protein, 9 aa, HIV-1
IVELLGRRG

SEQ ID NO: 8085 - protein, 15 aa, HIV-1
IVELLGRRGWEALKY

SEQ ID NO: 8086 - protein, 9 aa, HIV-1
LLGRRGWEA

SEQ ID NO: 8087 - protein, 15 aa, HIV-1
IVFAVLSIVNRVRQG

SEQ ID NO: 8088 - protein, 9 aa, HIV-1
FAVLSIVNR

SEQ ID NO: 8089 - protein, 15 aa, HIV-1
IVFAVLSIVNRVRQG

SEQ ID NO: 8090 - protein, 9 aa, HIV-1
LSIVNRVRQ

SEQ ID NO: 8091 - protein, 15 aa, HIV-1
IVFAVLSIVNRVRQG

SEQ ID NO: 8092 - protein, 9 aa, HIV-1
VLSIVNRVR

SEQ ID NO: 8093 - protein, 15 aa, HIV-1
IVGGLVGLRIVFAVL

SEQ ID NO: 8094 - protein, 9 aa, HIV-1
LVGLRIVFA

SEQ ID NO: 8095 - protein, 15 aa, HIV-1
IVGGLVGLRIVFAVL

SEQ ID NO: 8096 - protein, 9 aa, HIV-1
VGLRIVFAV

SEQ ID NO: 8097 - protein, 15 aa, HIV-1
IVNRVRQGYSPLSFQ

SEQ ID NO: 8098 - protein, 9 aa, HIV-1
VRQGYSPLS

SEQ ID NO: 8099 - protein, 15 aa, HIV-1
IVQLNTSVEINCTRP

SEQ ID NO: 8100 - protein, 9 aa, HIV-1
VQLNTSVEI

SEQ ID NO: 8101 - protein, 15 aa, HIV-1
IVQQQNNLLRAIEAQ

SEQ ID NO: 8102 - protein, 9 aa, HIV-1
IVQQQNNLL

SEQ ID NO: 8103 - protein, 15 aa, HIV-1
IVQQQNNLLRAIEAQ

SEQ ID NO: 8104 - protein, 9 aa, HIV-1
VQQQNNLLR

SEQ ID NO: 8105 - protein, 15 aa, HIV-1
IVTRIVELLGRRGWE

SEQ ID NO: 8106 - protein, 9 aa, HIV-1
IVELLGRRG

SEQ ID NO: 8107 - protein, 15 aa, HIV-1
IVTRIVELLGRRGWE

SEQ ID NO: 8108 - protein, 9 aa, HIV-1
TRIVELLGR

SEQ ID NO: 8109 - protein, 15 aa, HIV-1
IWDDLRSLCLFSYHR

SEQ ID NO: 8110 - protein, 9 aa, HIV-1
LRSLCLFSY

SEQ ID NO: 8111 - protein, 15 aa, HIV-1
IWNHTTWMEWDREIN

SEQ ID NO: 8112 - protein, 9 aa, HIV-1
IWNHTTWME

SEQ ID NO: 8113 - protein, 15 aa, HIV-1
KAMYAPPISGQIRCS

SEQ ID NO: 8114 - protein, 9 aa, HIV-1
YAPPISGQI

SEQ ID NO: 8115 - protein, 15 aa, HIV-1
KAYDTEVHNVWATHA

SEQ ID NO: 8116 - protein, 9 aa, HIV-1
TEVHNVWAT

SEQ ID NO: 8117 - protein, 15 aa, HIV-1
KCNNKTFNGTGPCTN

SEQ ID NO: 8118 - protein, 9 aa, HIV-1
TFNGTGPCT

SEQ ID NO: 8119 - protein, 15 aa, HIV-1
KCTDLKNDTNTNSSS

SEQ ID NO: 8120 - protein, 9 aa, HIV-1
LKNDTNTNS

SEQ ID NO: 8121 - protein, 15 aa, HIV-1
KEKYQHLWRWGWRWG

SEQ ID NO: 8122 - protein, 9 aa, HIV-1
QHLWRWGWR

SEQ ID NO: 8123 - protein, 15 aa, HIV-1
KEKYQHLWRWGWRWG

SEQ ID NO: 8124 - protein, 9 aa, HIV-1
YQHLWRWGW

SEQ ID NO: 8125 - protein, 15 aa, HIV-1
KEYAFFYKLDIIPID

SEQ ID NO: 8126 - protein, 9 aa, HIV-1
FYKLDIIPI

SEQ ID NO: 8127 - protein, 15 aa, HIV-1
KEYAFFYKLDIIPID

SEQ ID NO: 8128 - protein, 9 aa, HIV-1
YAFFYKLDI

SEQ ID NO: 8129 - protein, 15 aa, HIV-1
KGEIKNCSFNISTSI

SEQ ID NO: 8130 - protein, 9 aa, HIV-1
IKNCSFNIS

SEQ ID NO: 8131 - protein, 15 aa, HIV-1
KIEPLGVAPTKAKRR

SEQ ID NO: 8132 - protein, 9 aa, HIV-1
LGVAPTKAK

SEQ ID NO: 8133 - protein, 15 aa, HIV-1
KLFIMIVGGLVGLRI

SEQ ID NO: 8134 - protein, 9 aa, HIV-1
IMIVGGLVG

SEQ ID NO: 8135 - protein, 15 aa, HIV-1
KLFIMIVGGLVGLRI

SEQ ID NO: 8136 - protein, 9 aa, HIV-1
IVGGLVGLR

SEQ ID NO: 8137 - protein, 15 aa, HIV-1
KLICTTAVPWNASWS

SEQ ID NO: 8138 - protein, 9 aa, HIV-1
ICTTAVPWN

SEQ ID NO: 8139 - protein, 15 aa, HIV-1
KLICTTAVPWNASWS

SEQ ID NO: 8140 - protein, 9 aa, HIV-1
LICTTAVPW

SEQ ID NO: 8141 - protein, 15 aa, HIV-1
KLREQFGNNKTIIFK

SEQ ID NO: 8142 - protein, 9 aa, HIV-1
FGNNKTIIF

SEQ ID NO: 8143 - protein, 15 aa, HIV-1
KLTSCNTSVITQACP

SEQ ID NO: 8144 - protein, 9 aa, HIV-1
LTSCNTSVI

SEQ ID NO: 8145 - protein, 15 aa, HIV-1
KLWVTVYYGVPVWKE

SEQ ID NO: 8146 - protein, 9 aa, HIV-1
VTVYYGVPV

SEQ ID NO: 8147 - protein, 15 aa, HIV-1
KNCSFNISTSIRGKV

SEQ ID NO: 8148 - protein, 9 aa, HIV-1
FNISTSIRG

SEQ ID NO: 8149 - protein, 15 aa, HIV-1
KNSAVSLLNATAIAV

SEQ ID NO: 8150 - protein, 9 aa, HIV-1
VSLLNATAI

SEQ ID NO: 8151 - protein, 15 aa, HIV-1
KPCVKLTPLCVSLKC

SEQ ID NO: 8152 - protein, 9 aa, HIV-1
LTPLCVSLK

SEQ ID NO: 8153 - protein, 15 aa, HIV-1
KQIINMWQKVGKAMY

SEQ ID NO: 8154 - protein, 9 aa, HIV-1
INMWQKVGK

SEQ ID NO: 8155 - protein, 15 aa, HIV-1
KQIINMWQKVGKAMY

SEQ ID NO: 8156 - protein, 9 aa, HIV-1
MWQKVGKAM

SEQ ID NO: 8157 - protein, 15 aa, HIV-1
KRAVGIGALFLGFLG

SEQ ID NO: 8158 - protein, 9 aa, HIV-1
VGIGALFLG

SEQ ID NO: 8159 - protein, 15 aa, HIV-1
KRIRIQRGPGRAFVT

SEQ ID NO: 8160 - protein, 9 aa, HIV-1
IQRGPGRAF

SEQ ID NO: 8161 - protein, 15 aa, HIV-1
KRIRIQRGPGRAFVT

SEQ ID NO: 8162 - protein, 9 aa, HIV-1
IRIQRGPGR

SEQ ID NO: 8163 - protein, 15 aa, HIV-1
KSLEQIWNHTTWMEW

SEQ ID NO: 8164 - protein, 9 aa, HIV-1
IWNHTTWME

SEQ ID NO: 8165 - protein, 15 aa, HIV-1
KTFNGTGPCTNVSTV

SEQ ID NO: 8166 - protein, 9 aa, HIV-1
FNGTGPCTN

SEQ ID NO: 8167 - protein, 15 aa, HIV-1
KTIIFKQSSGGDPEI

SEQ ID NO: 8168 - protein, 9 aa, HIV-1
FKQSSGGDP

SEQ ID NO: 8169 - protein, 15 aa, HIV-1
KTIIVQLNTSVEINC

SEQ ID NO: 8170 - protein, 9 aa, HIV-1
IVQLNTSVE

SEQ ID NO: 8171 - protein, 15 aa, HIV-1
KTIIVQLNTSVEINC

SEQ ID NO: 8172 - protein, 9 aa, HIV-1
VQLNTSVEI

SEQ ID NO: 8173 - protein, 15 aa, HIV-1
KVGKAMYAPPISGQI

SEQ ID NO: 8174 - protein, 9 aa, HIV-1
GKAMYAPPI

SEQ ID NO: 8175 - protein, 15 aa, HIV-1
KVVKIEPLGVAPTKA

SEQ ID NO: 8176 - protein, 9 aa, HIV-1
IEPLGVAPT

SEQ ID NO: 8177 - protein, 15 aa, HIV-1
KWASLWNWFNITNWL

SEQ ID NO: 8178 - protein, 9 aa, HIV-1
WASLWNWFN

SEQ ID NO: 8179 - protein, 15 aa, HIV-1
KWNNTLKQIASKLRE

SEQ ID NO: 8180 - protein, 9 aa, HIV-1
LKQIASKLR

SEQ ID NO: 8181 - protein, 15 aa, HIV-1
KYKVVKIEPLGVAPT

SEQ ID NO: 8182 - protein, 9 aa, HIV-1
VKIEPLGVA

SEQ ID NO: 8183 - protein, 15 aa, HIV-1
KYKVVKIEPLGVAPT

SEQ ID NO: 8184 - protein, 9 aa, HIV-1
VVKIEPLGV

SEQ ID NO: 8185 - protein, 15 aa, HIV-1
KYQHLWRWGWRWGTM

SEQ ID NO: 8186 - protein, 9 aa, HIV-1
LWRWGWRWG

SEQ ID NO: 8187 - protein, 15 aa, HIV-1
KYQHLWRWGWRWGTM

SEQ ID NO: 8188 - protein, 9 aa, HIV-1
QHLWRWGWR

SEQ ID NO: 8189 - protein, 15 aa, HIV-1
KYWWNLLQYWSQELK

SEQ ID NO: 8190 - protein, 9 aa, HIV-1
KYWWNLLQY

SEQ ID NO: 8191 - protein, 15 aa, HIV-1
KYWWNLLQYWSQELK

SEQ ID NO: 8192 - protein, 9 aa, HIV-1
WNLLQYWSQ

SEQ ID NO: 8193 - protein, 15 aa, HIV-1
KYWWNLLQYWSQELK

SEQ ID NO: 8194 - protein, 9 aa, HIV-1
YWWNLLQYW

SEQ ID NO: 8195 - protein, 15 aa, HIV-1
LAEEEVVIRSVNFTD

SEQ ID NO: 8196 - protein, 9 aa, HIV-1
VVIRSVNFT

SEQ ID NO: 8197 - protein, 15 aa, HIV-1
LALIWDDLRSLCLFS

SEQ ID NO: 8198 - protein, 9 aa, HIV-1
WDDLRSLCL

SEQ ID NO: 8199 - protein, 15 aa, HIV-1
LCLFSYHRLRDLLLI

SEQ ID NO: 8200 - protein, 9 aa, HIV-1
YHRLRDLLL

SEQ ID NO: 8201 - protein, 15 aa, HIV-1
LDKWASLWNWFNITN

SEQ ID NO: 8202 - protein, 9 aa, HIV-1
WASLWNWFN

SEQ ID NO: 8203 - protein, 15 aa, HIV-1
LELDKWASLWNWFNI

SEQ ID NO: 8204 - protein, 9 aa, HIV-1
WASLWNWFN

SEQ ID NO: 8205 - protein, 15 aa, HIV-1
LEQIWNHTTWMEWDR

SEQ ID NO: 8206 - protein, 9 aa, HIV-1
IWNHTTWME

SEQ ID NO: 8207 - protein, 15 aa, HIV-1
LEQIWNHTTWMEWDR

SEQ ID NO: 8208 - protein, 9 aa, HIV-1
WNHTTWMEW

SEQ ID NO: 8209 - protein, 15 aa, HIV-1
LFIMIVGGLVGLRIV

SEQ ID NO: 8210 - protein, 9 aa, HIV-1
IMIVGGLVG

SEQ ID NO: 8211 - protein, 15 aa, HIV-1
LFIMIVGGLVGLRIV

SEQ ID NO: 8212 - protein, 9 aa, HIV-1
VGGLVGLRI

SEQ ID NO: 8213 - protein, 15 aa, HIV-1
LFLGFLGAAGSTMGA

SEQ ID NO: 8214 - protein, 9 aa, HIV-1
FLGFLGAAG

SEQ ID NO: 8215 - protein, 15 aa, HIV-1
LFLGFLGAAGSTMGA

SEQ ID NO: 8216 - protein, 9 aa, HIV-1
FLGAAGSTM

SEQ ID NO: 8217 - protein, 15 aa, HIV-1
LFLGFLGAAGSTMGA

SEQ ID NO: 8218 - protein, 9 aa, HIV-1
LGAAGSTMG

SEQ ID NO: 8219 - protein, 15 aa, HIV-1
LFNSTWFNSTWSTEG

SEQ ID NO: 8220 - protein, 9 aa, HIV-1
FNSTWFNST

SEQ ID NO: 8221 - protein, 15 aa, HIV-1
LFNSTWFNSTWSTEG

SEQ ID NO: 8222 - protein, 9 aa, HIV-1
LFNSTWFNS

SEQ ID NO: 8223 - protein, 15 aa, HIV-1
LFNSTWFNSTWSTEG

SEQ ID NO: 8224 - protein, 9 aa, HIV-1
STWFNSTWS

SEQ ID NO: 8225 - protein, 15 aa, HIV-1
LFNSTWFNSTWSTEG

SEQ ID NO: 8226 - protein, 9 aa, HIV-1
TWFNSTWST

SEQ ID NO: 8227 - protein, 15 aa, HIV-1
LFNSTWFNSTWSTEG

SEQ ID NO: 8228 - protein, 9 aa, HIV-1
WFNSTWSTE

SEQ ID NO: 8229 - protein, 15 aa, HIV-1
LFSYHRLRDLLLIVT

SEQ ID NO: 8230 - protein, 9 aa, HIV-1
YHRLRDLLL

SEQ ID NO: 8231 - protein, 15 aa, HIV-1
LGFLGAAGSTMGAAS

SEQ ID NO: 8232 - protein, 9 aa, HIV-1
LGAAGSTMG

SEQ ID NO: 8233 - protein, 15 aa, HIV-1
LGMLMICSATEKLWV

SEQ ID NO: 8234 - protein, 9 aa, HIV-1
MLMICSATE

SEQ ID NO: 8235 - protein, 15 aa, HIV-1
LGVAPTKAKRRVVQR

SEQ ID NO: 8236 - protein, 9 aa, HIV-1
PTKAKRRVV

SEQ ID NO: 8237 - protein, 15 aa, HIV-1
LGVAPTKAKRRVVQR

SEQ ID NO: 8238 - protein, 9 aa, HIV-1
VAPTKAKRR

SEQ ID NO: 8239 - protein, 15 aa, HIV-1
LGAAGSTMGAASMTL

SEQ ID NO: 8240 - protein, 9 aa, HIV-1
LGAAGSTMG

SEQ ID NO: 8241 - protein, 15 aa, HIV-1
LICTTAVPWNASWSN

SEQ ID NO: 8242 - protein, 9 aa, HIV-1
LICTTAVPW

SEQ ID NO: 8243 - protein, 15 aa, HIV-1
LICTTAVPWNASWSN

SEQ ID NO: 8244 - protein, 9 aa, HIV-1
TTAVPWNAS

SEQ ID NO: 8245 - protein, 15 aa, HIV-1
LIVTRIVELLGRRGW

SEQ ID NO: 8246 - protein, 9 aa, HIV-1
IVELLGRRG

SEQ ID NO: 8247 - protein, 15 aa, HIV-1
LIVTRIVELLGRRGW

SEQ ID NO: 8248 - protein, 9 aa, HIV-1
TRIVELLGR

SEQ ID NO: 8249 - protein, 15 aa, HIV-1
LIWDDLRSLCLFSYH

SEQ ID NO: 8250 - protein, 9 aa, HIV-1
WDDLRSLCL

SEQ ID NO: 8251 - protein, 15 aa, HIV-1
LKCTDLKNDTNTNSS

SEQ ID NO: 8252 - protein, 9 aa, HIV-1
LKNDTNTNS

SEQ ID NO: 8253 - protein, 15 aa, HIV-1
LKNSAVSLLNATAIA

SEQ ID NO: 8254 - protein, 9 aa, HIV-1
LKNSAVSLL

SEQ ID NO: 8255 - protein, 15 aa, HIV-1
LKPCVKLTPLCVSLK

SEQ ID NO: 8256 - protein, 9 aa, HIV-1
CVKLTPLCV

SEQ ID NO: 8257 - protein, 15 aa, HIV-1
LKQIASKLREQFGNN

SEQ ID NO: 8258 - protein, 9 aa, HIV-1
LKQIASKLR

SEQ ID NO: 8259 - protein, 15 aa, HIV-1
LKYWWNLLQYWSQEL

SEQ ID NO: 8260 - protein, 9 aa, HIV-1
LKYWWNLLQ

SEQ ID NO: 8261 - protein, 15 aa, HIV-1
LKYWWNLLQYWSQEL

SEQ ID NO: 8262 - protein, 9 aa, HIV-1
YWWNLLQYW

SEQ ID NO: 8263 - protein, 15 aa, HIV-1
LLELDKWASLWNWFN

SEQ ID NO: 8264 - protein, 9 aa, HIV-1
LDKWASLWN

SEQ ID NO: 8265 - protein, 15 aa, HIV-1
LLGMLMICSATEKLW

SEQ ID NO: 8266 - protein, 9 aa, HIV-1
LLGMLMICS

SEQ ID NO: 8267 - protein, 15 aa, HIV-1
LLIVTRIVELLGRRG

SEQ ID NO: 8268 - protein, 9 aa, HIV-1
IVTRIVELL

SEQ ID NO: 8269 - protein, 15 aa, HIV-1
LLIVTRIVELLGRRG

SEQ ID NO: 8270 - protein, 9 aa, HIV-1
LLIVTRIVE

SEQ ID NO: 8271 - protein, 15 aa, HIV-1
LLIVTRIVELLGRRG

SEQ ID NO: 8272 - protein, 9 aa, HIV-1
TRIVELLGR

SEQ ID NO: 8273 - protein, 15 aa, HIV-1
LLLIVTRIVELLGRR

SEQ ID NO: 8274 - protein, 9 aa, HIV-1
IVTRIVELL

SEQ ID NO: 8275 - protein, 15 aa, HIV-1
LLLIVTRIVELLGRR

SEQ ID NO: 8276 - protein, 9 aa, HIV-1
LIVTRIVEL

SEQ ID NO: 8277 - protein, 15 aa, HIV-1
LLLIVTRIVELLGRR

SEQ ID NO: 8278 - protein, 9 aa, HIV-1
LLIVTRIVE

SEQ ID NO: 8279 - protein, 15 aa, HIV-1
LLLIVTRIVELLGRR

SEQ ID NO: 8280 - protein, 9 aa, HIV-1
TRIVELLGR

SEQ ID NO: 8281 - protein, 15 aa, HIV-1
LLNATAIAVAEGTDR

SEQ ID NO: 8282 - protein, 9 aa, HIV-1
LLNATAIAV

SEQ ID NO: 8283 - protein, 15 aa, HIV-1
LLQLTVWGIKQLQAR

SEQ ID NO: 8284 - protein, 9 aa, HIV-1
LLQLTVWGI

SEQ ID NO: 8285 - protein, 15 aa, HIV-1
LLQYWSQELKNSAVS

SEQ ID NO: 8286 - protein, 9 aa, HIV-1
WSQELKNSA

SEQ ID NO: 8287 - protein, 15 aa, HIV-1
LLQYWSQELKNSAVS

SEQ ID NO: 8288 - protein, 9 aa, HIV-1
YWSQELKNS

SEQ ID NO: 8289 - protein, 15 aa, HIV-1
LLRAIEAQQHLLQLT

SEQ ID NO: 8290 - protein, 9 aa, HIV-1
LRAIEAQQH

SEQ ID NO: 8291 - protein, 15 aa, HIV-1
LLSGIVQQQNNLLRA

SEQ ID NO: 8292 - protein, 9 aa, HIV-1
IVQQQNNLL

SEQ ID NO: 8293 - protein, 15 aa, HIV-1
LLSGIVQQQNNLLRA

SEQ ID NO: 8294 - protein, 9 aa, HIV-1
VQQQNNLLR

SEQ ID NO: 8295 - protein, 15 aa, HIV-1
LNATAIAVAEGTDRV

SEQ ID NO: 8296 - protein, 9 aa, HIV-1
LNATAIAVA

SEQ ID NO: 8297 - protein, 15 aa, HIV-1
LQLTVWGIKQLQARI

SEQ ID NO: 8298 - protein, 9 aa, HIV-1
WGIKQLQAR

SEQ ID NO: 8299 - protein, 15 aa, HIV-1
LQYWSQELKNSAVSL

SEQ ID NO: 8300 - protein, 9 aa, HIV-1
YWSQELKNS

SEQ ID NO: 8301 - protein, 15 aa, HIV-1
LRAIEAQQHLLQLTV

SEQ ID NO: 8302 - protein, 9 aa, HIV-1
LRAIEAQQH

SEQ ID NO: 8303 - protein, 15 aa, HIV-1
LRDLLLIVTRIVELL

SEQ ID NO: 8304 - protein, 9 aa, HIV-1
LIVTRIVEL

SEQ ID NO: 8305 - protein, 15 aa, HIV-1
LRDLLLIVTRIVELL

SEQ ID NO: 8306 - protein, 9 aa, HIV-1
LLIVTRIVE

SEQ ID NO: 8307 - protein, 15 aa, HIV-1
LRDLLLIVTRIVELL

SEQ ID NO: 8308 - protein, 9 aa, HIV-1
LRDLLLIVT

SEQ ID NO: 8309 - protein, 15 aa, HIV-1
LREQFGNNKTIIFKQ

SEQ ID NO: 8310 - protein, 9 aa, HIV-1
FGNNKTIIF

SEQ ID NO: 8311 - protein, 15 aa, HIV-1
LRIVFAVLSIVNRVR

SEQ ID NO: 8312 - protein, 9 aa, HIV-1
FAVLSIVNR

SEQ ID NO: 8313 - protein, 15 aa, HIV-1
LRIVFAVLSIVNRVR

SEQ ID NO: 8314 - protein, 9 aa, HIV-1
LRIVFAVLS

SEQ ID NO: 8315 - protein, 15 aa, HIV-1
LRIVFAVLSIVNRVR

SEQ ID NO: 8316 - protein, 9 aa, HIV-1
VFAVLSIVN

SEQ ID NO: 8317 - protein, 15 aa, HIV-1
LRSLCLFSYHRLRDL

SEQ ID NO: 8318 - protein, 9 aa, HIV-1
LRSLCLFSY

SEQ ID NO: 8319 - protein, 15 aa, HIV-1
LSFQTHLPTPRGPDR

SEQ ID NO: 8320 - protein, 9 aa, HIV-1
FQTHLPTPR

SEQ ID NO: 8321 - protein, 15 aa, HIV-1
LSFQTHLPTPRGPDR

SEQ ID NO: 8322 - protein, 9 aa, HIV-1
QTHLPTPRG

SEQ ID NO: 8323 - protein, 15 aa, HIV-1
LSGIVQQQNNLLRAI

SEQ ID NO: 8324 - protein, 9 aa, HIV-1
IVQQQNNLL

SEQ ID NO: 8325 - protein, 15 aa, HIV-1
LSGIVQQQNNLLRAI

SEQ ID NO: 8326 - protein, 9 aa, HIV-1
VQQQNNLLR

SEQ ID NO: 8327 - protein, 15 aa, HIV-1
LSIVNRVRQGYSPLS

SEQ ID NO: 8328 - protein, 9 aa, HIV-1
IVNRVRQGY

SEQ ID NO: 8329 - protein, 15 aa, HIV-1
LSIVNRVRQGYSPLS

SEQ ID NO: 8330 - protein, 9 aa, HIV-1
RVRQGYSPL

SEQ ID NO: 8331 - protein, 15 aa, HIV-1
LSIVNRVRQGYSPLS

SEQ ID NO: 8332 - protein, 9 aa, HIV-1
VNRVRQGYS

SEQ ID NO: 8333 - protein, 15 aa, HIV-1
LTSCNTSVITQACPK

SEQ ID NO: 8334 - protein, 9 aa, HIV-1
LTSCNTSVI

SEQ ID NO: 8335 - protein, 15 aa, HIV-1
LTVQARQLLSGIVQQ

SEQ ID NO: 8336 - protein, 9 aa, HIV-1
LTVQARQLL

SEQ ID NO: 8337 - protein, 15 aa, HIV-1
LTVQARQLLSGIVQQ

SEQ ID NO: 8338 - protein, 9 aa, HIV-1
VQARQLLSG

SEQ ID NO: 8339 - protein, 15 aa, HIV-1
LTVWGIKQLQARILA

SEQ ID NO: 8340 - protein, 9 aa, HIV-1
IKQLQARIL

SEQ ID NO: 8341 - protein, 15 aa, HIV-1
LTVWGIKQLQARILA

SEQ ID NO: 8342 - protein, 9 aa, HIV-1
WGIKQLQAR

SEQ ID NO: 8343 - protein, 15 aa, HIV-1
LVGLRIVFAVLSIVN

SEQ ID NO: 8344 - protein, 9 aa, HIV-1
LRIVFAVLS

SEQ ID NO: 8345 - protein, 15 aa, HIV-1
LVNGSLALIWDDLRS

SEQ ID NO: 8346 - protein, 9 aa, HIV-1
LVNGSLALI

SEQ ID NO: 8347 - protein, 15 aa, HIV-1
LWNWFNITNWLWYIK

SEQ ID NO: 8348 - protein, 9 aa, HIV-1
FNITNWLWY

SEQ ID NO: 8349 - protein, 15 aa, HIV-1
LWNWFNITNWLWYIK

SEQ ID NO: 8350 - protein, 9 aa, HIV-1
WFNITNWLW

SEQ ID NO: 8351 - protein, 15 aa, HIV-1
LWRWGWRWGTMLLGM

SEQ ID NO: 8352 - protein, 9 aa, HIV-1
GWRWGTMLL

SEQ ID NO: 8353 - protein, 15 aa, HIV-1
LWRWGWRWGTMLLGM

SEQ ID NO: 8354 - protein, 9 aa, HIV-1
LWRWGWRWG

SEQ ID NO: 8355 - protein, 15 aa, HIV-1
LWRWGWRWGTMLLGM

SEQ ID NO: 8356 - protein, 9 aa, HIV-1
WRWGTMLLG

SEQ ID NO: 8357 - protein, 15 aa, HIV-1
LWVTVYYGVPVWKEA

SEQ ID NO: 8358 - protein, 9 aa, HIV-1
YYGVPVWKE

SEQ ID NO: 8359 - protein, 15 aa, HIV-1
LWYIKLFIMIVGGLV

SEQ ID NO: 8360 - protein, 9 aa, HIV-1
IKLFIMIVG

SEQ ID NO: 8361 - protein, 15 aa, HIV-1
LWYIKLFIMIVGGLV

SEQ ID NO: 8362 - protein, 9 aa, HIV-1
YIKLFIMIV

SEQ ID NO: 8363 - protein, 15 aa, HIV-1
LYKYKVVKIEPLGVA

SEQ ID NO: 8364 - protein, 9 aa, HIV-1
VVKIEPLGV

SEQ ID NO: 8365 - protein, 15 aa, HIV-1
LYKYKVVKIEPLGVA

SEQ ID NO: 8366 - protein, 9 aa, HIV-1
YKVVKIEPL

SEQ ID NO: 8367 - protein, 15 aa, HIV-1
MEKGEIKNCSFNIST

SEQ ID NO: 8368 - protein, 9 aa, HIV-1
IKNCSFNIS

SEQ ID NO: 8369 - protein, 15 aa, HIV-1
MEWDREINNYTSLIH

SEQ ID NO: 8370 - protein, 9 aa, HIV-1
EINNYTSLI

SEQ ID NO: 8371 - protein, 15 aa, HIV-1
MEWDREINNYTSLIH

SEQ ID NO: 8372 - protein, 9 aa, HIV-1
MEWDREINN

SEQ ID NO: 8373 - protein, 15 aa, HIV-1
MGAASMTLTVQARQL

SEQ ID NO: 8374 - protein, 9 aa, HIV-1
MGAASMTLT

SEQ ID NO: 8375 - protein, 15 aa, HIV-1
MHEDIISLWDQSLKP

SEQ ID NO: 8376 - protein, 9 aa, HIV-1
ISLWDQSLK

SEQ ID NO: 8377 - protein, 15 aa, HIV-1
MIVGGLVGLRIVFAV

SEQ ID NO: 8378 - protein, 9 aa, HIV-1
IVGGLVGLR

SEQ ID NO: 8379 - protein, 15 aa, HIV-1
MIVGGLVGLRIVFAV

SEQ ID NO: 8380 - protein, 9 aa, HIV-1
LVGLRIVFA

SEQ ID NO: 8381 - protein, 15 aa, HIV-1
MIVGGLVGLRIVFAV

SEQ ID NO: 8382 - protein, 9 aa, HIV-1
VGGLVGLRI

SEQ ID NO: 8383 - protein, 15 aa, HIV-1
MLLGMLMICSATEKL

SEQ ID NO: 8384 - protein, 9 aa, HIV-1
LLGMLMICS

SEQ ID NO: 8385 - protein, 15 aa, HIV-1
MRDNWRSELYKYKVV

SEQ ID NO: 8386 - protein, 9 aa, HIV-1
WRSELYKYK

SEQ ID NO: 8387 - protein, 15 aa, HIV-1
MRVKEKYQHLWRWGW

SEQ ID NO: 8388 - protein, 9 aa, HIV-1
MRVKEKYQH

SEQ ID NO: 8389 - protein, 15 aa, HIV-1
MTLTVQARQLLSGIV

SEQ ID NO: 8390 - protein, 9 aa, HIV-1
LTVQARQLL

SEQ ID NO: 8391 - protein, 15 aa, HIV-1
MTLTVQARQLLSGIV

SEQ ID NO: 8392 - protein, 9 aa, HIV-1
VQARQLLSG

SEQ ID NO: 8393 - protein, 15 aa, HIV-1
MWQKVGKAMYAPPIS

SEQ ID NO: 8394 - protein, 9 aa, HIV-1
QKVGKAMYA

SEQ ID NO: 8395 - protein, 15 aa, HIV-1
NAKTIIVQLNTSVEI

SEQ ID NO: 8396 - protein, 9 aa, HIV-1
IIVQLNTSV

SEQ ID NO: 8397 - protein, 15 aa, HIV-1
NAKTIIVQLNTSVEI

SEQ ID NO: 8398 - protein, 9 aa, HIV-1
IVQLNTSVE

SEQ ID NO: 8399 - protein, 15 aa, HIV-1
NATAIAVAEGTDRVI

SEQ ID NO: 8400 - protein, 9 aa, HIV-1
TAIAVAEGT

SEQ ID NO: 8401 - protein, 15 aa, HIV-1
NCSFNISTSIRGKVQ

SEQ ID NO: 8402 - protein, 9 aa, HIV-1
FNISTSIRG

SEQ ID NO: 8403 - protein, 15 aa, HIV-1
NCTRPNNNTRKRIRI

SEQ ID NO: 8404 - protein, 9 aa, HIV-1
PNNNTRKRI

SEQ ID NO: 8405 - protein, 15 aa, HIV-1
NCTRPNNNTRKRIRI

SEQ ID NO: 8406 - protein, 9 aa, HIV-1
TRPNNNTRK

SEQ ID NO: 8407 - protein, 15 aa, HIV-1
NFNMWKNDMVEQMHE

SEQ ID NO: 8408 - protein, 9 aa, HIV-1
FNMWKNDMV

SEQ ID NO: 8409 - protein, 15 aa, HIV-1
NFNMWKNDMVEQMHE

SEQ ID NO: 8410 - protein, 9 aa, HIV-1
WKNDMVEQM

SEQ ID NO: 8411 - protein, 15 aa, HIV-1
NHTTWMEWDREINNY

SEQ ID NO: 8412 - protein, 9 aa, HIV-1
MEWDREINN

SEQ ID NO: 8413 - protein, 15 aa, HIV-1
NISRAKWNNTLKQIA

SEQ ID NO: 8414 - protein, 9 aa, HIV-1
AKWNNTLKQ

SEQ ID NO: 8415 - protein, 15 aa, HIV-1
NISRAKWNNTLKQIA

SEQ ID NO: 8416 - protein, 9 aa, HIV-1
RAKWNNTLK

SEQ ID NO: 8417 - protein, 15 aa, HIV-1
NITGLLLTRDGGNSN

SEQ ID NO: 8418 - protein, 9 aa, HIV-1
ITGLLLTRD

SEQ ID NO: 8419 - protein, 15 aa, HIV-1
NITNWLWYIKLFIMI

SEQ ID NO: 8420 - protein, 9 aa, HIV-1
ITNWLWYIK

SEQ ID NO: 8421 - protein, 15 aa, HIV-1
NKSLEQIWNHTTWME

SEQ ID NO: 8422 - protein, 9 aa, HIV-1
LEQIWNHTT

SEQ ID NO: 8423 - protein, 15 aa, HIV-1
NKTFNGTGPCTNVST

SEQ ID NO: 8424 - protein, 9 aa, HIV-1
FNGTGPCTN

SEQ ID NO: 8425 - protein, 15 aa, HIV-1
NKTIIFKQSSGGDPE

SEQ ID NO: 8426 - protein, 9 aa, HIV-1
FKQSSGGDP

SEQ ID NO: 8427 - protein, 15 aa, HIV-1
NLLQYWSQELKNSAV

SEQ ID NO: 8428 - protein, 9 aa, HIV-1
LQYWSQELK

SEQ ID NO: 8429 - protein, 15 aa, HIV-1
NLLQYWSQELKNSAV

SEQ ID NO: 8430 - protein, 9 aa, HIV-1
YWSQELKNS

SEQ ID NO: 8431 - protein, 15 aa, HIV-1
NLLRAIEAQQHLLQL

SEQ ID NO: 8432 - protein, 9 aa, HIV-1
LRAIEAQQH

SEQ ID NO: 8433 - protein, 15 aa, HIV-1
NMWQKVGKAMYAPPI

SEQ ID NO: 8434 - protein, 9 aa, HIV-1
QKVGKAMYA

SEQ ID NO: 8435 - protein, 15 aa, HIV-1
NMWQKVGKAMYAPPI

SEQ ID NO: 8436 - protein, 9 aa, HIV-1
WQKVGKAMY

SEQ ID NO: 8437 - protein, 15 aa, HIV-1
NNKTFNGTGPCTNVS

SEQ ID NO: 8438 - protein, 9 aa, HIV-1
FNGTGPCTN

SEQ ID NO: 8439 - protein, 15 aa, HIV-1
NNKTIIFKQSSGGDP

SEQ ID NO: 8440 - protein, 9 aa, HIV-1
IFKQSSGGD

SEQ ID NO: 8441 - protein, 15 aa, HIV-1
NNLLRAIEAQQHLLQ

SEQ ID NO: 8442 - protein, 9 aa, HIV-1
LRAIEAQQH

SEQ ID NO: 8443 - protein, 15 aa, HIV-1
NNTLKQIASKLREQF

SEQ ID NO: 8444 - protein, 9 aa, HIV-1
LKQIASKLR

SEQ ID NO: 8445 - protein, 15 aa, HIV-1
NNTRKRIRIQRGPGR

SEQ ID NO: 8446 - protein, 9 aa, HIV-1
TRKRIRIQR

SEQ ID NO: 8447 - protein, 15 aa, HIV-1
NPQEVVLVNVTENFN

SEQ ID NO: 8448 - protein, 9 aa, HIV-1
VVLVNVTEN

SEQ ID NO: 8449 - protein, 15 aa, HIV-1
NRVRQGYSPLSFQTH

SEQ ID NO: 8450 - protein, 9 aa, HIV-1
VRQGYSPLS

SEQ ID NO: 8451 - protein, 15 aa, HIV-1
NSAVSLLNATAIAVA

SEQ ID NO: 8452 - protein, 9 aa, HIV-1
LLNATAIAV

SEQ ID NO: 8453 - protein, 15 aa, HIV-1
NSTQLFNSTWFNSTW

SEQ ID NO: 8454 - protein, 9 aa, HIV-1
FNSTWFNST

SEQ ID NO: 8455 - protein, 15 aa, HIV-1
NSTQLFNSTWFNSTW

SEQ ID NO: 8456 - protein, 9 aa, HIV-1
LFNSTWFNS

SEQ ID NO: 8457 - protein, 15 aa, HIV-1
NSTWFNSTWSTEGSN

SEQ ID NO: 8458 - protein, 9 aa, HIV-1
FNSTWSTEG

SEQ ID NO: 8459 - protein, 15 aa, HIV-1
NSTWFNSTWSTEGSN

SEQ ID NO: 8460 - protein, 9 aa, HIV-1
WFNSTWSTE

SEQ ID NO: 8461 - protein, 15 aa, HIV-1
NSTWSTEGSNNTEGS

SEQ ID NO: 8462 - protein, 9 aa, HIV-1
WSTEGSNNT

SEQ ID NO: 8463 - protein, 15 aa, HIV-1
NTLKQIASKLREQFG

SEQ ID NO: 8464 - protein, 9 aa, HIV-1
LKQIASKLR

SEQ ID NO: 8465 - protein, 15 aa, HIV-1
NTRKRIRIQRGPGRA

SEQ ID NO: 8466 - protein, 9 aa, HIV-1
IRIQRGPGR

SEQ ID NO: 8467 - protein, 15 aa, HIV-1
NTSVITQACPKVSFE

SEQ ID NO: 8468 - protein, 9 aa, HIV-1
ITQACPKVS

SEQ ID NO: 8469 - protein, 15 aa, HIV-1
NVTENFNMWKNDMVE

SEQ ID NO: 8470 - protein, 9 aa, HIV-1
FNMWKNDMV

SEQ ID NO: 8471 - protein, 15 aa, HIV-1
NVWATHACVPTDPNP

SEQ ID NO: 8472 - protein, 9 aa, HIV-1
HACVPTDPN

SEQ ID NO: 8473 - protein, 15 aa, HIV-1
NVWATHACVPTDPNP

SEQ ID NO: 8474 - protein, 9 aa, HIV-1
WATHACVPT

SEQ ID NO: 8475 - protein, 15 aa, HIV-1
NWFNITNWLWYIKLF

SEQ ID NO: 8476 - protein, 9 aa, HIV-1
FNITNWLWY

SEQ ID NO: 8477 - protein, 15 aa, HIV-1
NWFNITNWLWYIKLF

SEQ ID NO: 8478 - protein, 9 aa, HIV-1
ITNWLWYIK

SEQ ID NO: 8479 - protein, 15 aa, HIV-1
NWFNITNWLWYIKLF

SEQ ID NO: 8480 - protein, 9 aa, HIV-1
WFNITNWLW

SEQ ID NO: 8481 - protein, 15 aa, HIV-1
NWLWYIKLFIMIVGG

SEQ ID NO: 8482 - protein, 9 aa, HIV-1
IKLFIMIVG

SEQ ID NO: 8483 - protein, 15 aa, HIV-1
NWLWYIKLFIMIVGG

SEQ ID NO: 8484 - protein, 9 aa, HIV-1
LWYIKLFIM

SEQ ID NO: 8485 - protein, 15 aa, HIV-1
NWLWYIKLFIMIVGG

SEQ ID NO: 8486 - protein, 9 aa, HIV-1
YIKLFIMIV

SEQ ID NO: 8487 - protein, 15 aa, HIV-1
NWRSELYKYKVVKIE

SEQ ID NO: 8488 - protein, 9 aa, HIV-1
WRSELYKYK

SEQ ID NO: 8489 - protein, 15 aa, HIV-1
PCRIKQIINMWQKVG

SEQ ID NO: 8490 - protein, 9 aa, HIV-1
IKQIINMWQ

SEQ ID NO: 8491 - protein, 15 aa, HIV-1
PCVKLTPLCVSLKCT

SEQ ID NO: 8492 - protein, 9 aa, HIV-1
LTPLCVSLK

SEQ ID NO: 8493 - protein, 15 aa, HIV-1
PIHYCAPAGFAILKC

SEQ ID NO: 8494 - protein, 9 aa, HIV-1
YCAPAGFAI

SEQ ID NO: 8495 - protein, 15 aa, HIV-1
PIPIHYCAPAGFAIL

SEQ ID NO: 8496 - protein, 9 aa, HIV-1
YCAPAGFAI

SEQ ID NO: 8497 - protein, 15 aa, HIV-1
PLGVAPTKAKRRVVQ

SEQ ID NO: 8498 - protein, 9 aa, HIV-1
PTKAKRRVV

SEQ ID NO: 8499 - protein, 15 aa, HIV-1
PLGVAPTKAKRRVVQ

SEQ ID NO: 8500 - protein, 9 aa, HIV-1
VAPTKAKRR

SEQ ID NO: 8501 - protein, 15 aa, HIV-1
PLSFQTHLPTPRGPD

SEQ ID NO: 8502 - protein, 9 aa, HIV-1
FQTHLPTPR

SEQ ID NO: 8503 - protein, 15 aa, HIV-1
PLSFQTHLPTPRGPD

SEQ ID NO: 8504 - protein, 9 aa, HIV-1
QTHLPTPRG

SEQ ID NO: 8505 - protein, 15 aa, HIV-1
PNPQEVVLVNVTENF

SEQ ID NO: 8506 - protein, 9 aa, HIV-1
VVLVNVTEN

SEQ ID NO: 8507 - protein, 15 aa, HIV-1
PQEVVLVNVTENFNM

SEQ ID NO: 8508 - protein, 9 aa, HIV-1
LVNVTENFN

SEQ ID NO: 8509 - protein, 15 aa, HIV-1
PVVSTQLLLNGSLAE

SEQ ID NO: 8510 - protein, 9 aa, HIV-1
VSTQLLLNG

SEQ ID NO: 8511 - protein, 15 aa, HIV-1
PVWKEATTTLFCASD

SEQ ID NO: 8512 - protein, 9 aa, HIV-1
WKEATTTLF

SEQ ID NO: 8513 - protein, 15 aa, HIV-1
PWNASWSNKSLEQIW

SEQ ID NO: 8514 - protein, 9 aa, HIV-1
WNASWSNKS

SEQ ID NO: 8515 - protein, 15 aa, HIV-1
QARQLLSGIVQQQNN

SEQ ID NO: 8516 - protein, 9 aa, HIV-1
LLSGIVQQQ

SEQ ID NO: 8517 - protein, 15 aa, HIV-1
QCTHGIRPVVSTQLL

SEQ ID NO: 8518 - protein, 9 aa, HIV-1
IRPVVSTQL

SEQ ID NO: 8519 - protein, 15 aa, HIV-1
QELKNSAVSLLNATA

SEQ ID NO: 8520 - protein, 9 aa, HIV-1
LKNSAVSLL

SEQ ID NO: 8521 - protein, 15 aa, HIV-1
QELLELDKWASLWNW

SEQ ID NO: 8522 - protein, 9 aa, HIV-1
LDKWASLWN

SEQ ID NO: 8523 - protein, 15 aa, HIV-1
QEVVLVNVTENFNMW

SEQ ID NO: 8524 - protein, 9 aa, HIV-1
LVNVTENFN

SEQ ID NO: 8525 - protein, 15 aa, HIV-1
QFGNNKTIIFKQSSG

SEQ ID NO: 8526 - protein, 9 aa, HIV-1
FGNNKTIIF

SEQ ID NO: 8527 - protein, 15 aa, HIV-1
QGACRAIRHIPRRIR

SEQ ID NO: 8528 - protein, 9 aa, HIV-1
RAIRHIPRR

SEQ ID NO: 8529 - protein, 15 aa, HIV-1
QHLLQLTVWGIKQLQ

SEQ ID NO: 8530 - protein, 9 aa, HIV-1
LLQLTVWGI

SEQ ID NO: 8531 - protein, 15 aa, HIV-1
QHLWRWGWRWGTMLL

SEQ ID NO: 8532 - protein, 9 aa, HIV-1
LWRWGWRWG

SEQ ID NO: 8533 - protein, 15 aa, HIV-1
QHLWRWGWRWGTMLL

SEQ ID NO: 8534 - protein, 9 aa, HIV-1
QHLWRWGWR

SEQ ID NO: 8535 - protein, 15 aa, HIV-1
QHLWRWGWRWGTMLL

SEQ ID NO: 8536 - protein, 9 aa, HIV-1
WGWRWGTML

SEQ ID NO: 8537 - protein, 15 aa, HIV-1
QIASKLREQFGNNKT

SEQ ID NO: 8538 - protein, 9 aa, HIV-1
LREQFGNNK

SEQ ID NO: 8539 - protein, 15 aa, HIV-1
QIINMWQKVGKAMYA

SEQ ID NO: 8540 - protein, 9 aa, HIV-1
INMWQKVGK

SEQ ID NO: 8541 - protein, 15 aa, HIV-1
QIINMWQKVGKAMYA

SEQ ID NO: 8542 - protein, 9 aa, HIV-1
MWQKVGKAM

SEQ ID NO: 8543 - protein, 15 aa, HIV-1
QIINMWQKVGKAMYA

SEQ ID NO: 8544 - protein, 9 aa, HIV-1
WQKVGKAMY

SEQ ID NO: 8545 - protein, 15 aa, HIV-1
QIWNHTTWMEWDREI

SEQ ID NO: 8546 - protein, 9 aa, HIV-1
IWNHTTWME

SEQ ID NO: 8547 - protein, 15 aa, HIV-1
QKVGKAMYAPPISGQ

SEQ ID NO: 8548 - protein, 9 aa, HIV-1
GKAMYAPPI

SEQ ID NO: 8549 - protein, 15 aa, HIV-1
QLFNSTWFNSTWSTE

SEQ ID NO: 8550 - protein, 9 aa, HIV-1
FNSTWFNST

SEQ ID NO: 8551 - protein, 15 aa, HIV-1
QLFNSTWFNSTWSTE

SEQ ID NO: 8552 - protein, 9 aa, HIV-1
LFNSTWFNS

SEQ ID NO: 8553 - protein, 15 aa, HIV-1
QLFNSTWFNSTWSTE

SEQ ID NO: 8554 - protein, 9 aa, HIV-1
STWFNSTWS

SEQ ID NO: 8555 - protein, 15 aa, HIV-1
QLLSGIVQQQNNLLR

SEQ ID NO: 8556 - protein, 9 aa, HIV-1
IVQQQNNLL

SEQ ID NO: 8557 - protein, 15 aa, HIV-1
QLTVWGIKQLQARIL

SEQ ID NO: 8558 - protein, 9 aa, HIV-1
WGIKQLQAR

SEQ ID NO: 8559 - protein, 15 aa, HIV-1
QNNLLRAIEAQQHLL

SEQ ID NO: 8560 - protein, 9 aa, HIV-1
LRAIEAQQH

SEQ ID NO: 8561 - protein, 15 aa, HIV-1
QQHLLQLTVWGIKQL

SEQ ID NO: 8562 - protein, 9 aa, HIV-1
LLQLTVWGI

SEQ ID NO: 8563 - protein, 15 aa, HIV-1
QQNNLLRAIEAQQHL

SEQ ID NO: 8564 - protein, 9 aa, HIV-1
LRAIEAQQH

SEQ ID NO: 8565 - protein, 15 aa, HIV-1
QQQNNLLRAIEAQQH

SEQ ID NO: 8566 - protein, 9 aa, HIV-1
LLRAIEAQQ

SEQ ID NO: 8567 - protein, 15 aa, HIV-1
QQQNNLLRAIEAQQH

SEQ ID NO: 8568 - protein, 9 aa, HIV-1
NNLLRAIEA

SEQ ID NO: 8569 - protein, 15 aa, HIV-1
QREKRAVGIGALFLG

SEQ ID NO: 8570 - protein, 9 aa, HIV-1
AVGIGALFL

SEQ ID NO: 8571 - protein, 15 aa, HIV-1
QREKRAVGIGALFLG

SEQ ID NO: 8572 - protein, 9 aa, HIV-1
RAVGIGALF

SEQ ID NO: 8573 - protein, 15 aa, HIV-1
QSLKPCVKLTPLCVS

SEQ ID NO: 8574 - protein, 9 aa, HIV-1
CVKLTPLCV

SEQ ID NO: 8575 - protein, 15 aa, HIV-1
QTHLPTPRGPDRPEG

SEQ ID NO: 8576 - protein, 9 aa, HIV-1
QTHLPTPRG

SEQ ID NO: 8577 - protein, 15 aa, HIV-1
QYWSQELKNSAVSLL

SEQ ID NO: 8578 - protein, 9 aa, HIV-1
ELKNSAVSL

SEQ ID NO: 8579 - protein, 15 aa, HIV-1
QYWSQELKNSAVSLL

SEQ ID NO: 8580 - protein, 9 aa, HIV-1
WSQELKNSA

SEQ ID NO: 8581 - protein, 15 aa, HIV-1
RAFVTIGKIGNMRQA

SEQ ID NO: 8582 - protein, 9 aa, HIV-1
FVTIGKIGN

SEQ ID NO: 8583 - protein, 15 aa, HIV-1
RAIRHIPRRIRQGLE

SEQ ID NO: 8584 - protein, 9 aa, HIV-1
IRHIPRRIR

SEQ ID NO: 8585 - protein, 15 aa, HIV-1
RAKWNNTLKQIASKL

SEQ ID NO: 8586 - protein, 9 aa, HIV-1
WNNTLKQIA

SEQ ID NO: 8587 - protein, 15 aa, HIV-1
RAVGIGALFLGFLGA

SEQ ID NO: 8588 - protein, 9 aa, HIV-1
VGIGALFLG

SEQ ID NO: 8589 - protein, 15 aa, HIV-1
RCSSNITGLLLTRDG

SEQ ID NO: 8590 - protein, 9 aa, HIV-1
ITGLLLTRD

SEQ ID NO: 8591 - protein, 15 aa, HIV-1
RDLLLIVTRIVELLG

SEQ ID NO: 8592 - protein, 9 aa, HIV-1
LIVTRIVEL

SEQ ID NO: 8593 - protein, 15 aa, HIV-1
RDLLLIVTRIVELLG

SEQ ID NO: 8594 - protein, 9 aa, HIV-1
LLIVTRIVE

SEQ ID NO: 8595 - protein, 15 aa, HIV-1
RDLLLIVTRIVELLG

SEQ ID NO: 8596 - protein, 9 aa, HIV-1
LLLIVTRIV

SEQ ID NO: 8597 - protein, 15 aa, HIV-1
RDNWRSELYKYKVVK

SEQ ID NO: 8598 - protein, 9 aa, HIV-1
WRSELYKYK

SEQ ID NO: 8599 - protein, 15 aa, HIV-1
RDRDRSIRLVNGSLA

SEQ ID NO: 8600 - protein, 9 aa, HIV-1
DRSIRLVNG

SEQ ID NO: 8601 - protein, 15 aa, HIV-1
RDRSIRLVNGSLALI

SEQ ID NO: 8602 - protein, 9 aa, HIV-1
IRLVNGSLA

SEQ ID NO: 8603 - protein, 15 aa, HIV-1
REINNYTSLIHSLIE

SEQ ID NO: 8604 - protein, 9 aa, HIV-1
INNYTSLIH

SEQ ID NO: 8605 - protein, 15 aa, HIV-1
REINNYTSLIHSLIE

SEQ ID NO: 8606 - protein, 9 aa, HIV-1
YTSLIHSLI

SEQ ID NO: 8607 - protein, 15 aa, HIV-1
REKRAVGIGALFLGF

SEQ ID NO: 8608 - protein, 9 aa, HIV-1
VGIGALFLG

SEQ ID NO: 8609 - protein, 15 aa, HIV-1
REQFGNNKTIIFKQS

SEQ ID NO: 8610 - protein, 9 aa, HIV-1
FGNNKTIIF

SEQ ID NO: 8611 - protein, 15 aa, HIV-1
RGWEALKYWWNLLQY

SEQ ID NO: 8612 - protein, 9 aa, HIV-1
LKYWWNLLQ

SEQ ID NO: 8613 - protein, 15 aa, HIV-1
RIKQIINMWQKVGKA

SEQ ID NO: 8614 - protein, 9 aa, HIV-1
IINMWQKVG

SEQ ID NO: 8615 - protein, 15 aa, HIV-1
RIKQIINMWQKVGKA

SEQ ID NO: 8616 - protein, 9 aa, HIV-1
INMWQKVGK

SEQ ID NO: 8617 - protein, 15 aa, HIV-1
RIQRGPGRAFVTIGK

SEQ ID NO: 8618 - protein, 9 aa, HIV-1
IQRGPGRAF

SEQ ID NO: 8619 - protein, 15 aa, HIV-1
RIRIQRGPGRAFVTI

SEQ ID NO: 8620 - protein, 9 aa, HIV-1
IQRGPGRAF

SEQ ID NO: 8621 - protein, 15 aa, HIV-1
RIRIQRGPGRAFVTI

SEQ ID NO: 8622 - protein, 9 aa, HIV-1
IRIQRGPGR

SEQ ID NO: 8623 - protein, 15 aa, HIV-1
RIVELLGRRGWEALK

SEQ ID NO: 8624 - protein, 9 aa, HIV-1
IVELLGRRG

SEQ ID NO: 8625 - protein, 15 aa, HIV-1
RIVFAVLSIVNRVRQ

SEQ ID NO: 8626 - protein, 9 aa, HIV-1
FAVLSIVNR

SEQ ID NO: 8627 - protein, 15 aa, HIV-1
RIVFAVLSIVNRVRQ

SEQ ID NO: 8628 - protein, 9 aa, HIV-1
VLSIVNRVR

SEQ ID NO: 8629 - protein, 15 aa, HIV-1
RKRIRIQRGPGRAFV

SEQ ID NO: 8630 - protein, 9 aa, HIV-1
IQRGPGRAF

SEQ ID NO: 8631 - protein, 15 aa, HIV-1
RKRIRIQRGPGRAFV

SEQ ID NO: 8632 - protein, 9 aa, HIV-1
IRIQRGPGR

SEQ ID NO: 8633 - protein, 15 aa, HIV-1
RLRDLLLIVTRIVEL

SEQ ID NO: 8634 - protein, 9 aa, HIV-1
LLIVTRIVE

SEQ ID NO: 8635 - protein, 15 aa, HIV-1
RLRDLLLIVTRIVEL

SEQ ID NO: 8636 - protein, 9 aa, HIV-1
LLLIVTRIV

SEQ ID NO: 8637 - protein, 15 aa, HIV-1
RLRDLLLIVTRIVEL

SEQ ID NO: 8638 - protein, 9 aa, HIV-1
LRDLLLIVT

SEQ ID NO: 8639 - protein, 15 aa, HIV-1
RLVNGSLALIWDDLR

SEQ ID NO: 8640 - protein, 9 aa, HIV-1
VNGSLALIW

SEQ ID NO: 8641 - protein, 15 aa, HIV-1
RPVVSTQLLLNGSLA

SEQ ID NO: 8642 - protein, 9 aa, HIV-1
VVSTQLLLN

SEQ ID NO: 8643 - protein, 15 aa, HIV-1
RQGYSPLSFQTHLPT

SEQ ID NO: 8644 - protein, 9 aa, HIV-1
YSPLSFQTH

SEQ ID NO: 8645 - protein, 15 aa, HIV-1
RQLLSGIVQQQNNLL

SEQ ID NO: 8646 - protein, 9 aa, HIV-1
LLSGIVQQQ

SEQ ID NO: 8647 - protein, 15 aa, HIV-1
RQLLSGIVQQQNNLL

SEQ ID NO: 8648 - protein, 9 aa, HIV-1
LSGIVQQQN

SEQ ID NO: 8649 - protein, 15 aa, HIV-1
RRGWEALKYWWNLLQ

SEQ ID NO: 8650 - protein, 9 aa, HIV-1
RRGWEALKY

SEQ ID NO: 8651 - protein, 15 aa, HIV-1
RRGWEALKYWWNLLQ

SEQ ID NO: 8652 - protein, 9 aa, HIV-1
WEALKYWWN

SEQ ID NO: 8653 - protein, 15 aa, HIV-1
RSELYKYKVVKIEPL

SEQ ID NO: 8654 - protein, 9 aa, HIV-1
LYKYKVVKI

SEQ ID NO: 8655 - protein, 15 aa, HIV-1
RSELYKYKVVKIEPL

SEQ ID NO: 8656 - protein, 9 aa, HIV-1
YKYKVVKIE

SEQ ID NO: 8657 - protein, 15 aa, HIV-1
RSIRLVNGSLALIWD

SEQ ID NO: 8658 - protein, 9 aa, HIV-1
IRLVNGSLA

SEQ ID NO: 8659 - protein, 15 aa, HIV-1
RSIRLVNGSLALIWD

SEQ ID NO: 8660 - protein, 9 aa, HIV-1
LVNGSLALI

SEQ ID NO: 8661 - protein, 15 aa, HIV-1
RVIEVVQGACRAIRH

SEQ ID NO: 8662 - protein, 9 aa, HIV-1
VVQGACRAI

SEQ ID NO: 8663 - protein, 15 aa, HIV-1
RVKEKYQHLWRWGWR

SEQ ID NO: 8664 - protein, 9 aa, HIV-1
YQHLWRWGW

SEQ ID NO: 8665 - protein, 15 aa, HIV-1
RVRQGYSPLSFQTHL

SEQ ID NO: 8666 - protein, 9 aa, HIV-1
VRQGYSPLS

SEQ ID NO: 8667 - protein, 15 aa, HIV-1
RWGTMLLGMLMICSA

SEQ ID NO: 8668 - protein, 9 aa, HIV-1
LLGMLMICS

SEQ ID NO: 8669 - protein, 15 aa, HIV-1
RWGTMLLGMLMICSA

SEQ ID NO: 8670 - protein, 9 aa, HIV-1
WGTMLLGML

SEQ ID NO: 8671 - protein, 15 aa, HIV-1
RWGWRWGTMLLGMLM

SEQ ID NO: 8672 - protein, 9 aa, HIV-1
WGTMLLGML

SEQ ID NO: 8673 - protein, 15 aa, HIV-1
RWGWRWGTMLLGMLM

SEQ ID NO: 8674 - protein, 9 aa, HIV-1
WRWGTMLLG

SEQ ID NO: 8675 - protein, 15 aa, HIV-1
SAVSLLNATAIAVAE

SEQ ID NO: 8676 - protein, 9 aa, HIV-1
LLNATAIAV

SEQ ID NO: 8677 - protein, 15 aa, HIV-1
SCNTSVITQACPKVS

SEQ ID NO: 8678 - protein, 9 aa, HIV-1
VITQACPKV

SEQ ID NO: 8679 - protein, 15 aa, HIV-1
SELYKYKVVKIEPLG

SEQ ID NO: 8680 - protein, 9 aa, HIV-1
YKVVKIEPL

SEQ ID NO: 8681 - protein, 15 aa, HIV-1
SFNISTSIRGKVQKE

SEQ ID NO: 8682 - protein, 9 aa, HIV-1
FNISTSIRG

SEQ ID NO: 8683 - protein, 15 aa, HIV-1
SFQTHLPTPRGPDRP

SEQ ID NO: 8684 - protein, 9 aa, HIV-1
FQTHLPTPR

SEQ ID NO: 8685 - protein, 15 aa, HIV-1
SFQTHLPTPRGPDRP

SEQ ID NO: 8686 - protein, 9 aa, HIV-1
QTHLPTPRG

SEQ ID NO: 8687 - protein, 15 aa, HIV-1
SGIVQQQNNLLRAIE

SEQ ID NO: 8688 - protein, 9 aa, HIV-1
IVQQQNNLL

SEQ ID NO: 8689 - protein, 15 aa, HIV-1
SGIVQQQNNLLRAIE

SEQ ID NO: 8690 - protein, 9 aa, HIV-1
VQQQNNLLR

SEQ ID NO: 8691 - protein, 15 aa, HIV-1
SGKLICTTAVPWNAS

SEQ ID NO: 8692 - protein, 9 aa, HIV-1
ICTTAVPWN

SEQ ID NO: 8693 - protein, 15 aa, HIV-1
SGKLICTTAVPWNAS

SEQ ID NO: 8694 - protein, 9 aa, HIV-1
LICTTAVPW

SEQ ID NO: 8695 - protein, 15 aa, HIV-1
SIRLVNGSLALIWDD

SEQ ID NO: 8696 - protein, 9 aa, HIV-1
IRLVNGSLA

SEQ ID NO: 8697 - protein, 15 aa, HIV-1
SIRLVNGSLALIWDD

SEQ ID NO: 8698 - protein, 9 aa, HIV-1
LVNGSLALI

SEQ ID NO: 8699 - protein, 15 aa, HIV-1
SIVNRVRQGYSPLSF

SEQ ID NO: 8700 - protein, 9 aa, HIV-1
IVNRVRQGY

SEQ ID NO: 8701 - protein, 15 aa, HIV-1
SIVNRVRQGYSPLSF

SEQ ID NO: 8702 - protein, 9 aa, HIV-1
VRQGYSPLS

SEQ ID NO: 8703 - protein, 15 aa, HIV-1
SKLREQFGNNKTIIF

SEQ ID NO: 8704 - protein, 9 aa, HIV-1
LREQFGNNK

SEQ ID NO: 8705 - protein, 15 aa, HIV-1
SKLREQFGNNKTIIF

SEQ ID NO: 8706 - protein, 9 aa, HIV-1
QFGNNKTII

SEQ ID NO: 8707 - protein, 15 aa, HIV-1
SLAEEEVVIRSVNFT

SEQ ID NO: 8708 - protein, 9 aa, HIV-1
EEVVIRSVN

SEQ ID NO: 8709 - protein, 15 aa, HIV-1
SLAEEEVVIRSVNFT

SEQ ID NO: 8710 - protein, 9 aa, HIV-1
EVVIRSVNF

SEQ ID NO: 8711 - protein, 15 aa, HIV-1
SLALIWDDLRSLCLF

SEQ ID NO: 8712 - protein, 9 aa, HIV-1
WDDLRSLCL

SEQ ID NO: 8713 - protein, 15 aa, HIV-1
SLCLFSYHRLRDLLL

SEQ ID NO: 8714 - protein, 9 aa, HIV-1
FSYHRLRDL

SEQ ID NO: 8715 - protein, 15 aa, HIV-1
SLEQIWNHTTWMEWD

SEQ ID NO: 8716 - protein, 9 aa, HIV-1
IWNHTTWME

SEQ ID NO: 8717 - protein, 15 aa, HIV-1
SLEQIWNHTTWMEWD

SEQ ID NO: 8718 - protein, 9 aa, HIV-1
WNHTTWMEW

SEQ ID NO: 8719 - protein, 15 aa, HIV-1
SLKCTDLKNDTNTNS

SEQ ID NO: 8720 - protein, 9 aa, HIV-1
DLKNDTNTN

SEQ ID NO: 8721 - protein, 15 aa, HIV-1
SLKPCVKLTPLCVSL

SEQ ID NO: 8722 - protein, 9 aa, HIV-1
VKLTPLCVS

SEQ ID NO: 8723 - protein, 15 aa, HIV-1
SLLNATAIAVAEGTD

SEQ ID NO: 8724 - protein, 9 aa, HIV-1
LLNATAIAV

SEQ ID NO: 8725 - protein, 15 aa, HIV-1
SLWDQSLKPCVKLTP

SEQ ID NO: 8726 - protein, 9 aa, HIV-1
LWDQSLKPC

SEQ ID NO: 8727 - protein, 15 aa, HIV-1
SLWNWFNITNWLWYI

SEQ ID NO: 8728 - protein, 9 aa, HIV-1
FNITNWLWY

SEQ ID NO: 8729 - protein, 15 aa, HIV-1
SLWNWFNITNWLWYI

SEQ ID NO: 8730 - protein, 9 aa, HIV-1
WFNITNWLW

SEQ ID NO: 8731 - protein, 15 aa, HIV-1
SLWNWFNITNWLWYI

SEQ ID NO: 8732 - protein, 9 aa, HIV-1
WNWFNITNW

SEQ ID NO: 8733 - protein, 15 aa, HIV-1
SMTLTVQARQLLSGI

SEQ ID NO: 8734 - protein, 9 aa, HIV-1
LTVQARQLL

SEQ ID NO: 8735 - protein, 15 aa, HIV-1
SMTLTVQARQLLSGI

SEQ ID NO: 8736 - protein, 9 aa, HIV-1
VQARQLLSG

SEQ ID NO: 8737 - protein, 15 aa, HIV-1
SNITGLLLTRDGGNS

SEQ ID NO: 8738 - protein, 9 aa, HIV-1
ITGLLLTRD

SEQ ID NO: 8739 - protein, 15 aa, HIV-1
SPLSFQTHLPTPRGP

SEQ ID NO: 8740 - protein, 9 aa, HIV-1
FQTHLPTPR

SEQ ID NO: 8741 - protein, 15 aa, HIV-1
SPLSFQTHLPTPRGP

SEQ ID NO: 8742 - protein, 9 aa, HIV-1
QTHLPTPRG

SEQ ID NO: 8743 - protein, 15 aa, HIV-1
SQELKNSAVSLLNAT

SEQ ID NO: 8744 - protein, 9 aa, HIV-1
LKNSAVSLL

SEQ ID NO: 8745 - protein, 15 aa, HIV-1
SRAKWNNTLKQIASK

SEQ ID NO: 8746 - protein, 9 aa, HIV-1
WNNTLKQIA

SEQ ID NO: 8747 - protein, 15 aa, HIV-1
SSNITGLLLTRDGGN

SEQ ID NO: 8748 - protein, 9 aa, HIV-1
ITGLLLTRD

SEQ ID NO: 8749 - protein, 15 aa, HIV-1
STMGAASMTLTVQAR

SEQ ID NO: 8750 - protein, 9 aa, HIV-1
MGAASMTLT

SEQ ID NO: 8751 - protein, 15 aa, HIV-1
STQLFNSTWFNSTWS

SEQ ID NO: 8752 - protein, 9 aa, HIV-1
FNSTWFNST

SEQ ID NO: 8753 - protein, 15 aa, HIV-1
STQLFNSTWFNSTWS

SEQ ID NO: 8754 - protein, 9 aa, HIV-1
LFNSTWFNS

SEQ ID NO: 8755 - protein, 15 aa, HIV-1
STQLLLNGSLAEEEV

SEQ ID NO: 8756 - protein, 9 aa, HIV-1
LLLNGSLAE

SEQ ID NO: 8757 - protein, 15 aa, HIV-1
STVQCTHGIRPVVST

SEQ ID NO: 8758 - protein, 9 aa, HIV-1
THGIRPVVS

SEQ ID NO: 8759 - protein, 15 aa, HIV-1
STWFNSTWSTEGSNN

SEQ ID NO: 8760 - protein, 9 aa, HIV-1
FNSTWSTEG

SEQ ID NO: 8761 - protein, 15 aa, HIV-1
STWFNSTWSTEGSNN

SEQ ID NO: 8762 - protein, 9 aa, HIV-1
WFNSTWSTE

SEQ ID NO: 8763 - protein, 15 aa, HIV-1
STWSTEGSNNTEGSD

SEQ ID NO: 8764 - protein, 9 aa, HIV-1
WSTEGSNNT

SEQ ID NO: 8765 - protein, 15 aa, HIV-1
SVEINCTRPNNNTRK

SEQ ID NO: 8766 - protein, 9 aa, HIV-1
INCTRPNNN

SEQ ID NO: 8767 - protein, 15 aa, HIV-1
SVITQACPKVSFEPI

SEQ ID NO: 8768 - protein, 9 aa, HIV-1
ITQACPKVS

SEQ ID NO: 8769 - protein, 15 aa, HIV-1
SYHRLRDLLLIVTRI

SEQ ID NO: 8770 - protein, 9 aa, HIV-1
LRDLLLIVT

SEQ ID NO: 8771 - protein, 15 aa, HIV-1
SYKLTSCNTSVITQA

SEQ ID NO: 8772 - protein, 9 aa, HIV-1
LTSCNTSVI

SEQ ID NO: 8773 - protein, 15 aa, HIV-1
TAIAVAEGTDRVIEV

SEQ ID NO: 8774 - protein, 9 aa, HIV-1
IAVAEGTDR

SEQ ID NO: 8775 - protein, 15 aa, HIV-1
TAVPWNASWSNKSLE

SEQ ID NO: 8776 - protein, 9 aa, HIV-1
VPWNASWSN

SEQ ID NO: 8777 - protein, 15 aa, HIV-1
TAVPWNASWSNKSLE

SEQ ID NO: 8778 - protein, 9 aa, HIV-1
WNASWSNKS

SEQ ID NO: 8779 - protein, 15 aa, HIV-1
TDLKNDTNTNSSSGR

SEQ ID NO: 8780 - protein, 9 aa, HIV-1
LKNDTNTNS

SEQ ID NO: 8781 - protein, 15 aa, HIV-1
TDNAKTIIVQLNTSV

SEQ ID NO: 8782 - protein, 9 aa, HIV-1
AKTIIVQLN

SEQ ID NO: 8783 - protein, 15 aa, HIV-1
TDRVIEVVQGACRAI

SEQ ID NO: 8784 - protein, 9 aa, HIV-1
EVVQGACRA

SEQ ID NO: 8785 - protein, 15 aa, HIV-1
TENFNMWKNDMVEQM

SEQ ID NO: 8786 - protein, 9 aa, HIV-1
FNMWKNDMV

SEQ ID NO: 8787 - protein, 15 aa, HIV-1
TENFNMWKNDMVEQM

SEQ ID NO: 8788 - protein, 9 aa, HIV-1
MWKNDMVEQ

SEQ ID NO: 8789 - protein, 15 aa, HIV-1
TEVHNVWATHACVPT

SEQ ID NO: 8790 - protein, 9 aa, HIV-1
VHNVWATHA

SEQ ID NO: 8791 - protein, 15 aa, HIV-1
TFNGTGPCTNVSTVQ

SEQ ID NO: 8792 - protein, 9 aa, HIV-1
FNGTGPCTN

SEQ ID NO: 8793 - protein, 15 aa, HIV-1
THACVPTDPNPQEVV

SEQ ID NO: 8794 - protein, 9 aa, HIV-1
VPTDPNPQE

SEQ ID NO: 8795 - protein, 15 aa, HIV-1
THGIRPVVSTQLLLN

SEQ ID NO: 8796 - protein, 9 aa, HIV-1
IRPVVSTQL

SEQ ID NO: 8797 - protein, 15 aa, HIV-1
TIIFKQSSGGDPEIV

SEQ ID NO: 8798 - protein, 9 aa, HIV-1
FKQSSGGDP

SEQ ID NO: 8799 - protein, 15 aa, HIV-1
TIIVQLNTSVEINCT

SEQ ID NO: 8800 - protein, 9 aa, HIV-1
IVQLNTSVE

SEQ ID NO: 8801 - protein, 15 aa, HIV-1
TIIVQLNTSVEINCT

SEQ ID NO: 8802 - protein, 9 aa, HIV-1
VQLNTSVEI

SEQ ID NO: 8803 - protein, 15 aa, HIV-1
TLFCASDAKAYDTEV

SEQ ID NO: 8804 - protein, 9 aa, HIV-1
FCASDAKAY

SEQ ID NO: 8805 - protein, 15 aa, HIV-1
TLKQIASKLREQFGN

SEQ ID NO: 8806 - protein, 9 aa, HIV-1
LKQIASKLR

SEQ ID NO: 8807 - protein, 15 aa, HIV-1
TLTVQARQLLSGIVQ

SEQ ID NO: 8808 - protein, 9 aa, HIV-1
LTVQARQLL

SEQ ID NO: 8809 - protein, 15 aa, HIV-1
TLTVQARQLLSGIVQ

SEQ ID NO: 8810 - protein, 9 aa, HIV-1
VQARQLLSG

SEQ ID NO: 8811 - protein, 15 aa, HIV-1
TMGAASMTLTVQARQ

SEQ ID NO: 8812 - protein, 9 aa, HIV-1
MGAASMTLT

SEQ ID NO: 8813 - protein, 15 aa, HIV-1
TMLLGMLMICSATEK

SEQ ID NO: 8814 - protein, 9 aa, HIV-1
LLGMLMICS

SEQ ID NO: 8815 - protein, 15 aa, HIV-1
TNWLWYIKLFIMIVG

SEQ ID NO: 8816 - protein, 9 aa, HIV-1
LWYIKLFIM

SEQ ID NO: 8817 - protein, 15 aa, HIV-1
TNWLWYIKLFIMIVG

SEQ ID NO: 8818 - protein, 9 aa, HIV-1
WLWYIKLFI

SEQ ID NO: 8819 - protein, 15 aa, HIV-1
TNWLWYIKLFIMIVG

SEQ ID NO: 8820 - protein, 9 aa, HIV-1
YIKLFIMIV

SEQ ID NO: 8821 - protein, 15 aa, HIV-1
TQLFNSTWFNSTWST

SEQ ID NO: 8822 - protein, 9 aa, HIV-1
FNSTWFNST

SEQ ID NO: 8823 - protein, 15 aa, HIV-1
TQLFNSTWFNSTWST

SEQ ID NO: 8824 - protein, 9 aa, HIV-1
LFNSTWFNS

SEQ ID NO: 8825 - protein, 15 aa, HIV-1
TQLFNSTWFNSTWST

SEQ ID NO: 8826 - protein, 9 aa, HIV-1
STWFNSTWS

SEQ ID NO: 8827 - protein, 15 aa, HIV-1
TRIVELLGRRGWEAL

SEQ ID NO: 8828 - protein, 9 aa, HIV-1
IVELLGRRG

SEQ ID NO: 8829 - protein, 15 aa, HIV-1
TRIVELLGRRGWEAL

SEQ ID NO: 8830 - protein, 9 aa, HIV-1
TRIVELLGR

SEQ ID NO: 8831 - protein, 15 aa, HIV-1
TRKRIRIQRGPGRAF

SEQ ID NO: 8832 - protein, 9 aa, HIV-1
IRIQRGPGR

SEQ ID NO: 8833 - protein, 15 aa, HIV-1
TRKRIRIQRGPGRAF

SEQ ID NO: 8834 - protein, 9 aa, HIV-1
RKRIRIQRG

SEQ ID NO: 8835 - protein, 15 aa, HIV-1
TRPNNNTRKRIRIQR

SEQ ID NO: 8836 - protein, 9 aa, HIV-1
PNNNTRKRI

SEQ ID NO: 8837 - protein, 15 aa, HIV-1
TSVITQACPKVSFEP

SEQ ID NO: 8838 - protein, 9 aa, HIV-1
ITQACPKVS

SEQ ID NO: 8839 - protein, 15 aa, HIV-1
TSYKLTSCNTSVITQ

SEQ ID NO: 8840 - protein, 9 aa, HIV-1
LTSCNTSVI

SEQ ID NO: 8841 - protein, 15 aa, HIV-1
TTAVPWNASWSNKSL

SEQ ID NO: 8842 - protein, 9 aa, HIV-1
VPWNASWSN

SEQ ID NO: 8843 - protein, 15 aa, HIV-1
TTAVPWNASWSNKSL

SEQ ID NO: 8844 - protein, 9 aa, HIV-1
WNASWSNKS

SEQ ID NO: 8845 - protein, 15 aa, HIV-1
TTLFCASDAKAYDTE

SEQ ID NO: 8846 - protein, 9 aa, HIV-1
FCASDAKAY

SEQ ID NO: 8847 - protein, 15 aa, HIV-1
TTSYKLTSCNTSVIT

SEQ ID NO: 8848 - protein, 9 aa, HIV-1
LTSCNTSVI

SEQ ID NO: 8849 - protein, 15 aa, HIV-1
TTSYKLTSCNTSVIT

SEQ ID NO: 8850 - protein, 9 aa, HIV-1
YKLTSCNTS

SEQ ID NO: 8851 - protein, 15 aa, HIV-1
TTTLFCASDAKAYDT

SEQ ID NO: 8852 - protein, 9 aa, HIV-1
FCASDAKAY

SEQ ID NO: 8853 - protein, 15 aa, HIV-1
TTWMEWDREINNYTS

SEQ ID NO: 8854 - protein, 9 aa, HIV-1
MEWDREINN

SEQ ID NO: 8855 - protein, 15 aa, HIV-1
TVQARQLLSGIVQQQ

SEQ ID NO: 8856 - protein, 9 aa, HIV-1
VQARQLLSG

SEQ ID NO: 8857 - protein, 15 aa, HIV-1
TVQCTHGIRPVVSTQ

SEQ ID NO: 8858 - protein, 9 aa, HIV-1
THGIRPVVS

SEQ ID NO: 8859 - protein, 15 aa, HIV-1
TVWGIKQLQARILAV

SEQ ID NO: 8860 - protein, 9 aa, HIV-1
IKQLQARIL

SEQ ID NO: 8861 - protein, 15 aa, HIV-1
TVWGIKQLQARILAV

SEQ ID NO: 8862 - protein, 9 aa, HIV-1
WGIKQLQAR

SEQ ID NO: 8863 - protein, 15 aa, HIV-1
TVYYGVPVWKEATTT

SEQ ID NO: 8864 - protein, 9 aa, HIV-1
YYGVPVWKE

SEQ ID NO: 8865 - protein, 15 aa, HIV-1
TWFNSTWSTEGSNNT

SEQ ID NO: 8866 - protein, 9 aa, HIV-1
FNSTWSTEG

SEQ ID NO: 8867 - protein, 15 aa, HIV-1
TWMEWDREINNYTSL

SEQ ID NO: 8868 - protein, 9 aa, HIV-1
MEWDREINN

SEQ ID NO: 8869 - protein, 15 aa, HIV-1
VAPTKAKRRVVQREK

SEQ ID NO: 8870 - protein, 9 aa, HIV-1
PTKAKRRVV

SEQ ID NO: 8871 - protein, 15 aa, HIV-1
VAPTKAKRRVVQREK

SEQ ID NO: 8872 - protein, 9 aa, HIV-1
VAPTKAKRR

SEQ ID NO: 8873 - protein, 15 aa, HIV-1
VEINCTRPNNNTRKR

SEQ ID NO: 8874 - protein, 9 aa, HIV-1
TRPNNNTRK

SEQ ID NO: 8875 - protein, 15 aa, HIV-1
VFAVLSIVNRVRQGY

SEQ ID NO: 8876 - protein, 9 aa, HIV-1
LSIVNRVRQ

SEQ ID NO: 8877 - protein, 15 aa, HIV-1
VFAVLSIVNRVRQGY

SEQ ID NO: 8878 - protein, 9 aa, HIV-1
VFAVLSIVN

SEQ ID NO: 8879 - protein, 15 aa, HIV-1
VFAVLSIVNRVRQGY

SEQ ID NO: 8880 - protein, 9 aa, HIV-1
VLSIVNRVR

SEQ ID NO: 8881 - protein, 15 aa, HIV-1
VGGLVGLRIVFAVLS

SEQ ID NO: 8882 - protein, 9 aa, HIV-1
LVGLRIVFA

SEQ ID NO: 8883 - protein, 15 aa, HIV-1
VGGLVGLRIVFAVLS

SEQ ID NO: 8884 - protein, 9 aa, HIV-1
VGLRIVFAV

SEQ ID NO: 8885 - protein, 15 aa, HIV-1
VGIGALFLGFLGAAG

SEQ ID NO: 8886 - protein, 9 aa, HIV-1
IGALFLGFL

SEQ ID NO: 8887 - protein, 15 aa, HIV-1
VGIGALFLGFLGAAG

SEQ ID NO: 8888 - protein, 9 aa, HIV-1
LFLGFLGAA

SEQ ID NO: 8889 - protein, 15 aa, HIV-1
VGKAMYAPPISGQIR

SEQ ID NO: 8890 - protein, 9 aa, HIV-1
YAPPISGQI

SEQ ID NO: 8891 - protein, 15 aa, HIV-1
VGLRIVFAVLSIVNR

SEQ ID NO: 8892 - protein, 9 aa, HIV-1
IVFAVLSIV

SEQ ID NO: 8893 - protein, 15 aa, HIV-1
VGLRIVFAVLSIVNR

SEQ ID NO: 8894 - protein, 9 aa, HIV-1
LRIVFAVLS

SEQ ID NO: 8895 - protein, 15 aa, HIV-1
VHNVWATHACVPTDP

SEQ ID NO: 8896 - protein, 9 aa, HIV-1
WATHACVPT

SEQ ID NO: 8897 - protein, 15 aa, HIV-1
VIEVVQGACRAIRHI

SEQ ID NO: 8898 - protein, 9 aa, HIV-1
VVQGACRAI

SEQ ID NO: 8899 - protein, 15 aa, HIV-1
VITQACPKVSFEPIP

SEQ ID NO: 8900 - protein, 9 aa, HIV-1
ITQACPKVS

SEQ ID NO: 8901 - protein, 15 aa, HIV-1
VKEKYQHLWRWGWRW

SEQ ID NO: 8902 - protein, 9 aa, HIV-1
QHLWRWGWR

SEQ ID NO: 8903 - protein, 15 aa, HIV-1
VKIEPLGVAPTKAKR

SEQ ID NO: 8904 - protein, 9 aa, HIV-1
IEPLGVAPT

SEQ ID NO: 8905 - protein, 15 aa, HIV-1
VKIEPLGVAPTKAKR

SEQ ID NO: 8906 - protein, 9 aa, HIV-1
LGVAPTKAK

SEQ ID NO: 8907 - protein, 15 aa, HIV-1
VKLTPLCVSLKCTDL

SEQ ID NO: 8908 - protein, 9 aa, HIV-1
LTPLCVSLK

SEQ ID NO: 8909 - protein, 15 aa, HIV-1
VLSIVNRVRQGYSPL

SEQ ID NO: 8910 - protein, 9 aa, HIV-1
IVNRVRQGY

SEQ ID NO: 8911 - protein, 15 aa, HIV-1
VNGSLALIWDDLRSL

SEQ ID NO: 8912 - protein, 9 aa, HIV-1
VNGSLALIW

SEQ ID NO: 8913 - protein, 15 aa, HIV-1
VNRVRQGYSPLSFQT

SEQ ID NO: 8914 - protein, 9 aa, HIV-1
VRQGYSPLS

SEQ ID NO: 8915 - protein, 15 aa, HIV-1
VNVTENFNMWKNDMV

SEQ ID NO: 8916 - protein, 9 aa, HIV-1
NFNMWKNDM

SEQ ID NO: 8917 - protein, 15 aa, HIV-1
VNVTENFNMWKNDMV

SEQ ID NO: 8918 - protein, 9 aa, HIV-1
TENFNMWKN

SEQ ID NO: 8919 - protein, 15 aa, HIV-1
VPVWKEATTTLFCAS

SEQ ID NO: 8920 - protein, 9 aa, HIV-1
WKEATTTLF

SEQ ID NO: 8921 - protein, 15 aa, HIV-1
VPWNASWSNKSLEQI

SEQ ID NO: 8922 - protein, 9 aa, HIV-1
WNASWSNKS

SEQ ID NO: 8923 - protein, 15 aa, HIV-1
VQARQLLSGIVQQQN

SEQ ID NO: 8924 - protein, 9 aa, HIV-1
VQARQLLSG

SEQ ID NO: 8925 - protein, 15 aa, HIV-1
VQCTHGIRPVVSTQL

SEQ ID NO: 8926 - protein, 9 aa, HIV-1
THGIRPVVS

SEQ ID NO: 8927 - protein, 15 aa, HIV-1
VQLNTSVEINCTRPN

SEQ ID NO: 8928 - protein, 9 aa, HIV-1
VQLNTSVEI

SEQ ID NO: 8929 - protein, 15 aa, HIV-1
VQQQNNLLRAIEAQQ

SEQ ID NO: 8930 - protein, 9 aa, HIV-1
VQQQNNLLR

SEQ ID NO: 8931 - protein, 15 aa, HIV-1
VQREKRAVGIGALFL

SEQ ID NO: 8932 - protein, 9 aa, HIV-1
VQREKRAVG

SEQ ID NO: 8933 - protein, 15 aa, HIV-1
VRQGYSPLSFQTHLP

SEQ ID NO: 8934 - protein, 9 aa, HIV-1
VRQGYSPLS

SEQ ID NO: 8935 - protein, 15 aa, HIV-1
VSLLNATAIAVAEGT

SEQ ID NO: 8936 - protein, 9 aa, HIV-1
LLNATAIAV

SEQ ID NO: 8937 - protein, 15 aa, HIV-1
VSTQLLLNGSLAEEE

SEQ ID NO: 8938 - protein, 9 aa, HIV-1
LLLNGSLAE

SEQ ID NO: 8939 - protein, 15 aa, HIV-1
VSTVQCTHGIRPVVS

SEQ ID NO: 8940 - protein, 9 aa, HIV-1
VQCTHGIRP

SEQ ID NO: 8941 - protein, 15 aa, HIV-1
VTENFNMWKNDMVEQ

SEQ ID NO: 8942 - protein, 9 aa, HIV-1
FNMWKNDMV

SEQ ID NO: 8943 - protein, 15 aa, HIV-1
VTIGKIGNMRQAHCN

SEQ ID NO: 8944 - protein, 9 aa, HIV-1
IGNMRQAHC

SEQ ID NO: 8945 - protein, 15 aa, HIV-1
VTRIVELLGRRGWEA

SEQ ID NO: 8946 - protein, 9 aa, HIV-1
IVELLGRRG

SEQ ID NO: 8947 - protein, 15 aa, HIV-1
VTRIVELLGRRGWEA

SEQ ID NO: 8948 - protein, 9 aa, HIV-1
TRIVELLGR

SEQ ID NO: 8949 - protein, 15 aa, HIV-1
VTVYYGVPVWKEATT

SEQ ID NO: 8950 - protein, 9 aa, HIV-1
YYGVPVWKE

SEQ ID NO: 8951 - protein, 15 aa, HIV-1
VVIRSVNFTDNAKTI

SEQ ID NO: 8952 - protein, 9 aa, HIV-1
VVIRSVNFT

SEQ ID NO: 8953 - protein, 15 aa, HIV-1
VVKIEPLGVAPTKAK

SEQ ID NO: 8954 - protein, 9 aa, HIV-1
IEPLGVAPT

SEQ ID NO: 8955 - protein, 15 aa, HIV-1
VVKIEPLGVAPTKAK

SEQ ID NO: 8956 - protein, 9 aa, HIV-1
VKIEPLGVA

SEQ ID NO: 8957 - protein, 15 aa, HIV-1
VVLVNVTENFNMWKN

SEQ ID NO: 8958 - protein, 9 aa, HIV-1
LVNVTENFN

SEQ ID NO: 8959 - protein, 15 aa, HIV-1
VVSTQLLLNGSLAEE

SEQ ID NO: 8960 - protein, 9 aa, HIV-1
STQLLLNGS

SEQ ID NO: 8961 - protein, 15 aa, HIV-1
VWATHACVPTDPNPQ

SEQ ID NO: 8962 - protein, 9 aa, HIV-1
HACVPTDPN

SEQ ID NO: 8963 - protein, 15 aa, HIV-1
VWGIKQLQARILAVE

SEQ ID NO: 8964 - protein, 9 aa, HIV-1
IKQLQARIL

SEQ ID NO: 8965 - protein, 15 aa, HIV-1
VWGIKQLQARILAVE

SEQ ID NO: 8966 - protein, 9 aa, HIV-1
WGIKQLQAR

SEQ ID NO: 8967 - protein, 15 aa, HIV-1
VWKEATTTLFCASDA

SEQ ID NO: 8968 - protein, 9 aa, HIV-1
WKEATTTLF

SEQ ID NO: 8969 - protein, 15 aa, HIV-1
VYYGVPVWKEATTTL

SEQ ID NO: 8970 - protein, 9 aa, HIV-1
PVWKEATTT

SEQ ID NO: 8971 - protein, 15 aa, HIV-1
VYYGVPVWKEATTTL

SEQ ID NO: 8972 - protein, 9 aa, HIV-1
YYGVPVWKE

SEQ ID NO: 8973 - protein, 15 aa, HIV-1
WASLWNWFNITNWLW

SEQ ID NO: 8974 - protein, 9 aa, HIV-1
ASLWNWFNI

SEQ ID NO: 8975 - protein, 15 aa, HIV-1
WASLWNWFNITNWLW

SEQ ID NO: 8976 - protein, 9 aa, HIV-1
WASLWNWFN

SEQ ID NO: 8977 - protein, 15 aa, HIV-1
WATHACVPTDPNPQE

SEQ ID NO: 8978 - protein, 9 aa, HIV-1
HACVPTDPN

SEQ ID NO: 8979 - protein, 15 aa, HIV-1
WDDLRSLCLFSYHRL

SEQ ID NO: 8980 - protein, 9 aa, HIV-1
LRSLCLFSY

SEQ ID NO: 8981 - protein, 15 aa, HIV-1
WDREINNYTSLIHSL

SEQ ID NO: 8982 - protein, 9 aa, HIV-1
INNYTSLIH

SEQ ID NO: 8983 - protein, 15 aa, HIV-1
WEALKYWWNLLQYWS

SEQ ID NO: 8984 - protein, 9 aa, HIV-1
LKYWWNLLQ

SEQ ID NO: 8985 - protein, 15 aa, HIV-1
WEALKYWWNLLQYWS

SEQ ID NO: 8986 - protein, 9 aa, HIV-1
YWWNLLQYW

SEQ ID NO: 8987 - protein, 15 aa, HIV-1
WFNITNWLWYIKLFI

SEQ ID NO: 8988 - protein, 9 aa, HIV-1
FNITNWLWY

SEQ ID NO: 8989 - protein, 15 aa, HIV-1
WFNITNWLWYIKLFI

SEQ ID NO: 8990 - protein, 9 aa, HIV-1
ITNWLWYIK

SEQ ID NO: 8991 - protein, 15 aa, HIV-1
WFNITNWLWYIKLFI

SEQ ID NO: 8992 - protein, 9 aa, HIV-1
WFNITNWLW

SEQ ID NO: 8993 - protein, 15 aa, HIV-1
WFNSTWSTEGSNNTE

SEQ ID NO: 8994 - protein, 9 aa, HIV-1
FNSTWSTEG

SEQ ID NO: 8995 - protein, 15 aa, HIV-1
WFNSTWSTEGSNNTE

SEQ ID NO: 8996 - protein, 9 aa, HIV-1
NSTWSTEGS

SEQ ID NO: 8997 - protein, 15 aa, HIV-1
WFNSTWSTEGSNNTE

SEQ ID NO: 8998 - protein, 9 aa, HIV-1
WSTEGSNNT

SEQ ID NO: 8999 - protein, 15 aa, HIV-1
WGCSGKLICTTAVPW

SEQ ID NO: 9000 - protein, 9 aa, HIV-1
WGCSGKLIC

SEQ ID NO: 9001 - protein, 15 aa, HIV-1
WGIKQLQARILAVER

SEQ ID NO: 9002 - protein, 9 aa, HIV-1
IKQLQARIL

SEQ ID NO: 9003 - protein, 15 aa, HIV-1
WGTMLLGMLMICSAT

SEQ ID NO: 9004 - protein, 9 aa, HIV-1
LGMLMICSA

SEQ ID NO: 9005 - protein, 15 aa, HIV-1
WGTMLLGMLMICSAT

SEQ ID NO: 9006 - protein, 9 aa, HIV-1
LLGMLMICS

SEQ ID NO: 9007 - protein, 15 aa, HIV-1
WGWRWGTMLLGMLMI

SEQ ID NO: 9008 - protein, 9 aa, HIV-1
WGTMLLGML

SEQ ID NO: 9009 - protein, 15 aa, HIV-1
WGWRWGTMLLGMLMI

SEQ ID NO: 9010 - protein, 9 aa, HIV-1
WRWGTMLLG

SEQ ID NO: 9011 - protein, 15 aa, HIV-1
WKEATTTLFCASDAK

SEQ ID NO: 9012 - protein, 9 aa, HIV-1
WKEATTTLF

SEQ ID NO: 9013 - protein, 15 aa, HIV-1
WLWYIKLFIMIVGGL

SEQ ID NO: 9014 - protein, 9 aa, HIV-1
IKLFIMIVG

SEQ ID NO: 9015 - protein, 15 aa, HIV-1
WLWYIKLFIMIVGGL

SEQ ID NO: 9016 - protein, 9 aa, HIV-1
YIKLFIMIV

SEQ ID NO: 9017 - protein, 15 aa, HIV-1
WMEWDREINNYTSLI

SEQ ID NO: 9018 - protein, 9 aa, HIV-1
MEWDREINN

SEQ ID NO: 9019 - protein, 15 aa, HIV-1
WNASWSNKSLEQIWN

SEQ ID NO: 9020 - protein, 9 aa, HIV-1
WNASWSNKS

SEQ ID NO: 9021 - protein, 15 aa, HIV-1
WNHTTWMEWDREINN

SEQ ID NO: 9022 - protein, 9 aa, HIV-1
WMEWDREIN

SEQ ID NO: 9023 - protein, 15 aa, HIV-1
WNLLQYWSQELKNSA

SEQ ID NO: 9024 - protein, 9 aa, HIV-1
LQYWSQELK

SEQ ID NO: 9025 - protein, 15 aa, HIV-1
WNLLQYWSQELKNSA

SEQ ID NO: 9026 - protein, 9 aa, HIV-1
YWSQELKNS

SEQ ID NO: 9027 - protein, 15 aa, HIV-1
WNNTLKQIASKLREQ

SEQ ID NO: 9028 - protein, 9 aa, HIV-1
LKQIASKLR

SEQ ID NO: 9029 - protein, 15 aa, HIV-1
WNWFNITNWLWYIKL

SEQ ID NO: 9030 - protein, 9 aa, HIV-1
FNITNWLWY

SEQ ID NO: 9031 - protein, 15 aa, HIV-1
WNWFNITNWLWYIKL

SEQ ID NO: 9032 - protein, 9 aa, HIV-1
ITNWLWYIK

SEQ ID NO: 9033 - protein, 15 aa, HIV-1
WNWFNITNWLWYIKL

SEQ ID NO: 9034 - protein, 9 aa, HIV-1
WFNITNWLW

SEQ ID NO: 9035 - protein, 15 aa, HIV-1
WQKVGKAMYAPPISG

SEQ ID NO: 9036 - protein, 9 aa, HIV-1
GKAMYAPPI

SEQ ID NO: 9037 - protein, 15 aa, HIV-1
WRSELYKYKVVKIEP

SEQ ID NO: 9038 - protein, 9 aa, HIV-1
WRSELYKYK

SEQ ID NO: 9039 - protein, 15 aa, HIV-1
WRWGTMLLGMLMICS

SEQ ID NO: 9040 - protein, 9 aa, HIV-1
WGTMLLGML

SEQ ID NO: 9041 - protein, 15 aa, HIV-1
WRWGTMLLGMLMICS

SEQ ID NO: 9042 - protein, 9 aa, HIV-1
WRWGTMLLG

SEQ ID NO: 9043 - protein, 15 aa, HIV-1
WRWGWRWGTMLLGML

SEQ ID NO: 9044 - protein, 9 aa, HIV-1
WGWRWGTML

SEQ ID NO: 9045 - protein, 15 aa, HIV-1
WRWGWRWGTMLLGML

SEQ ID NO: 9046 - protein, 9 aa, HIV-1
WRWGTMLLG

SEQ ID NO: 9047 - protein, 15 aa, HIV-1
WSQELKNSAVSLLNA

SEQ ID NO: 9048 - protein, 9 aa, HIV-1
LKNSAVSLL

SEQ ID NO: 9049 - protein, 15 aa, HIV-1
WVTVYYGVPVWKEAT

SEQ ID NO: 9050 - protein, 9 aa, HIV-1
YYGVPVWKE

SEQ ID NO: 9051 - protein, 15 aa, HIV-1
WWNLLQYWSQELKNS

SEQ ID NO: 9052 - protein, 9 aa, HIV-1
LLQYWSQEL

SEQ ID NO: 9053 - protein, 15 aa, HIV-1
WWNLLQYWSQELKNS

SEQ ID NO: 9054 - protein, 9 aa, HIV-1
LQYWSQELK

SEQ ID NO: 9055 - protein, 15 aa, HIV-1
WYIKLFIMIVGGLVG

SEQ ID NO: 9056 - protein, 9 aa, HIV-1
FIMIVGGLV

SEQ ID NO: 9057 - protein, 15 aa, HIV-1
WYIKLFIMIVGGLVG

SEQ ID NO: 9058 - protein, 9 aa, HIV-1
IKLFIMIVG

SEQ ID NO: 9059 - protein, 15 aa, HIV-1
YAFFYKLDIIPIDND

SEQ ID NO: 9060 - protein, 9 aa, HIV-1
YKLDIIPID

SEQ ID NO: 9061 - protein, 15 aa, HIV-1
YCNSTQLFNSTWFNS

SEQ ID NO: 9062 - protein, 9 aa, HIV-1
TQLFNSTWF

SEQ ID NO: 9063 - protein, 15 aa, HIV-1
YDTEVHNVWATHACV

SEQ ID NO: 9064 - protein, 9 aa, HIV-1
VHNVWATHA

SEQ ID NO: 9065 - protein, 15 aa, HIV-1
YGVPVWKEATTTLFC

SEQ ID NO: 9066 - protein, 9 aa, HIV-1
WKEATTTLF

SEQ ID NO: 9067 - protein, 15 aa, HIV-1
YHRLRDLLLIVTRIV

SEQ ID NO: 9068 - protein, 9 aa, HIV-1
LRDLLLIVT

SEQ ID NO: 9069 - protein, 15 aa, HIV-1
YIKLFIMIVGGLVGL

SEQ ID NO: 9070 - protein, 9 aa, HIV-1
FIMIVGGLV

SEQ ID NO: 9071 - protein, 15 aa, HIV-1
YIKLFIMIVGGLVGL

SEQ ID NO: 9072 - protein, 9 aa, HIV-1
IKLFIMIVG

SEQ ID NO: 9073 - protein, 15 aa, HIV-1
YIKLFIMIVGGLVGL

SEQ ID NO: 9074 - protein, 9 aa, HIV-1
IMIVGGLVG

SEQ ID NO: 9075 - protein, 15 aa, HIV-1
YKLTSCNTSVITQAC

SEQ ID NO: 9076 - protein, 9 aa, HIV-1
LTSCNTSVI

SEQ ID NO: 9077 - protein, 15 aa, HIV-1
YKVVKIEPLGVAPTK

SEQ ID NO: 9078 - protein, 9 aa, HIV-1
IEPLGVAPT

SEQ ID NO: 9079 - protein, 15 aa, HIV-1
YKVVKIEPLGVAPTK

SEQ ID NO: 9080 - protein, 9 aa, HIV-1
VKIEPLGVA

SEQ ID NO: 9081 - protein, 15 aa, HIV-1
YKYKVVKIEPLGVAP

SEQ ID NO: 9082 - protein, 9 aa, HIV-1
VVKIEPLGV

SEQ ID NO: 9083 - protein, 15 aa, HIV-1
YKYKVVKIEPLGVAP

SEQ ID NO: 9084 - protein, 9 aa, HIV-1
YKVVKIEPL

SEQ ID NO: 9085 - protein, 15 aa, HIV-1
YQHLWRWGWRWGTML

SEQ ID NO: 9086 - protein, 9 aa, HIV-1
LWRWGWRWG

SEQ ID NO: 9087 - protein, 15 aa, HIV-1
YQHLWRWGWRWGTML

SEQ ID NO: 9088 - protein, 9 aa, HIV-1
QHLWRWGWR

SEQ ID NO: 9089 - protein, 15 aa, HIV-1
YQHLWRWGWRWGTML

SEQ ID NO: 9090 - protein, 9 aa, HIV-1
WRWGWRWGT

SEQ ID NO: 9091 - protein, 15 aa, HIV-1
YSPLSFQTHLPTPRG

SEQ ID NO: 9092 - protein, 9 aa, HIV-1
FQTHLPTPR

SEQ ID NO: 9093 - protein, 15 aa, HIV-1
YSPLSFQTHLPTPRG

SEQ ID NO: 9094 - protein, 9 aa, HIV-1
SFQTHLPTP

SEQ ID NO: 9095 - protein, 15 aa, HIV-1
YWSQELKNSAVSLLN

SEQ ID NO: 9096 - protein, 9 aa, HIV-1
LKNSAVSLL

SEQ ID NO: 9097 - protein, 15 aa, HIV-1
YWWNLLQYWSQELKN

SEQ ID NO: 9098 - protein, 9 aa, HIV-1
LQYWSQELK

SEQ ID NO: 9099 - protein, 15 aa, HIV-1
YWWNLLQYWSQELKN

SEQ ID NO: 9100 - protein, 9 aa, HIV-1
YWWNLLQYW

SEQ ID NO: 9101 - protein, 15 aa, HIV-1
YYGVPVWKEATTTLF

SEQ ID NO: 9102 - protein, 9 aa, HIV-1
VWKEATTTL

SEQ ID NO: 9103 - protein, 15 aa, HIV-1
YYGVPVWKEATTTLF

SEQ ID NO: 9104 - protein, 9 aa, HIV-1
YYGVPVWKE

SEQ ID NO: 9105 - protein, 15 aa, HIV-1
AAGSTMGAASMTLTV

SEQ ID NO: 9106 - protein, 9 aa, HIV-1
MGAASMTLT

SEQ ID NO: 9107 - protein, 15 aa, HIV-1
AASMTLTVQARQLLS

SEQ ID NO: 9108 - protein, 9 aa, HIV-1
LTVQARQLL

SEQ ID NO: 9109 - protein, 8 aa, HIV-1
GKWSKSSV

SEQ ID NO: 9110 - protein, 8 aa, HIV-1
KWSKSSVI

SEQ ID NO: 9111 - protein, 8 aa, HIV-1
SVIGWPTV

SEQ ID NO: 9112 - protein, 8 aa, HIV-1
VIGWPTVR

SEQ ID NO: 9113 - protein, 8 aa, HIV-1
WPTVRERM

SEQ ID NO: 9114 - protein, 8 aa, HIV-1
TVRERMRR

SEQ ID NO: 9115 - protein, 8 aa, HIV-1
RMRRAEPA

SEQ ID NO: 9116 - protein, 8 aa, HIV-1
AEPAADRV

SEQ ID NO: 9117 - protein, 8 aa, HIV-1
AASRDLEK

SEQ ID NO: 9118 - protein, 8 aa, HIV-1
NTAATNAA

SEQ ID NO: 9119 - protein, 8 aa, HIV-1
ATNAACAW

SEQ ID NO: 9120 - protein, 8 aa, HIV-1
TNAACAWL

SEQ ID NO: 9121 - protein, 8 aa, HIV-1
QEEEEVGF

SEQ ID NO: 9122 - protein, 8 aa, HIV-1
EEEVGFPV

SEQ ID NO: 9123 - protein, 8 aa, HIV-1
EEVGFPVT

SEQ ID NO: 9124 - protein, 8 aa, HIV-1
FPVTPQVP

SEQ ID NO: 9125 - protein, 8 aa, HIV-1
PVTPQVPL

SEQ ID NO: 9126 - protein, 8 aa, HIV-1
VTPQVPLR

SEQ ID NO: 9127 - protein, 8 aa, HIV-1
VPLRPMTY

SEQ ID NO: 9128 - protein, 8 aa, HIV-1
PLRPMTYK

SEQ ID NO: 9129 - protein, 8 aa, HIV-1
RPMTYKAA

SEQ ID NO: 9130 - protein, 8 aa, HIV-1
PMTYKAAV

SEQ ID NO: 9131 - protein, 8 aa, HIV-1
TYKAAVDL

SEQ ID NO: 9132 - protein, 8 aa, HIV-1
AAVDLSHF

SEQ ID NO: 9133 - protein, 8 aa, HIV-1
AVDLSHFL

SEQ ID NO: 9134 - protein, 8 aa, HIV-1
LSHFLKEK

SEQ ID NO: 9135 - protein, 8 aa, HIV-1
FLKEKGGL

SEQ ID NO: 9136 - protein, 8 aa, HIV-1
RRQDILDL

SEQ ID NO: 9137 - protein, 8 aa, HIV-1
DILDLWIY

SEQ ID NO: 9138 - protein, 8 aa, HIV-1
ILDLWIYH

SEQ ID NO: 9139 - protein, 8 aa, HIV-1
DLWIYHTQ

SEQ ID NO: 9140 - protein, 8 aa, HIV-1
WIYHTQGY

SEQ ID NO: 9141 - protein, 8 aa, HIV-1
IYHTQGYF

SEQ ID NO: 9142 - protein, 8 aa, HIV-1
YFPDWQNY

SEQ ID NO: 9143 - protein, 8 aa, HIV-1
FPDWQNYT

SEQ ID NO: 9144 - protein, 8 aa, HIV-1
NYTPGPGV

SEQ ID NO: 9145 - protein, 8 aa, HIV-1
YTPGPGVR

SEQ ID NO: 9146 - protein, 8 aa, HIV-1
TPGPGVRY

SEQ ID NO: 9147 - protein, 8 aa, HIV-1
GPGVRYPL

SEQ ID NO: 9148 - protein, 8 aa, HIV-1
GVRYPLTF

SEQ ID NO: 9149 - protein, 8 aa, HIV-1
RYPLTFGW

SEQ ID NO: 9150 - protein, 8 aa, HIV-1
YPLTFGWC

SEQ ID NO: 9151 - protein, 8 aa, HIV-1
LTFGWCYK

SEQ ID NO: 9152 - protein, 8 aa, HIV-1
TFGWCYKL

SEQ ID NO: 9153 - protein, 8 aa, HIV-1
FGWCYKLV

SEQ ID NO: 9154 - protein, 8 aa, HIV-1
WCYKLVPV

SEQ ID NO: 9155 - protein, 8 aa, HIV-1
VPVEPDKI

SEQ ID NO: 9156 - protein, 8 aa, HIV-1
NTSLLHPV

SEQ ID NO: 9157 - protein, 8 aa, HIV-1
SLLHPVSL

SEQ ID NO: 9158 - protein, 8 aa, HIV-1
LLHPVSLH

SEQ ID NO: 9159 - protein, 8 aa, HIV-1
HPVSLHGM

SEQ ID NO: 9160 - protein, 8 aa, HIV-1
HGMDDPER

SEQ ID NO: 9161 - protein, 8 aa, HIV-1
PEREVLEW

SEQ ID NO: 9162 - protein, 8 aa, HIV-1
REVLEWRF

SEQ ID NO: 9163 - protein, 8 aa, HIV-1
RFDSRLAF

SEQ ID NO: 9164 - protein, 8 aa, HIV-1
SRLAFHHV

SEQ ID NO: 9165 - protein, 8 aa, HIV-1
RLAFHHVA

SEQ ID NO: 9166 - protein, 8 aa, HIV-1
LAFHHVAR

SEQ ID NO: 9167 - protein, 8 aa, HIV-1
FHHVAREL

SEQ ID NO: 9168 - protein, 8 aa, HIV-1
RELHPEYF

SEQ ID NO: 9169 - protein, 8 aa, HIV-1
ELHPEYFK

SEQ ID NO: 9170 - protein, 9 aa, HIV-1
WSKSSVIGW

SEQ ID NO: 9171 - protein, 9 aa, HIV-1
SSVIGWPTV

SEQ ID NO: 9172 - protein, 9 aa, HIV-1
SVIGWPTVR

SEQ ID NO: 9173 - protein, 9 aa, HIV-1
PTVRERMRR

SEQ ID NO: 9174 - protein, 9 aa, HIV-1
TVRERMRRA

SEQ ID NO: 9175 - protein, 9 aa, HIV-1
RMRRAEPAA

SEQ ID NO: 9176 - protein, 9 aa, HIV-1
RRAEPAADR

SEQ ID NO: 9177 - protein, 9 aa, HIV-1
RAEPAADRV

SEQ ID NO: 9178 - protein, 9 aa, HIV-1
EPAADRVGA

SEQ ID NO: 9179 - protein, 9 aa, HIV-1
GAASRDLEK

SEQ ID NO: 9180 - protein, 9 aa, HIV-1
NTAATNAAC

SEQ ID NO: 9181 - protein, 9 aa, HIV-1
TAATNAACA

SEQ ID NO: 9182 - protein, 9 aa, HIV-1
AATNAACAW

SEQ ID NO: 9183 - protein, 9 aa, HIV-1
ATNAACAWL

SEQ ID NO: 9184 - protein, 9 aa, HIV-1
NAACAWLEA

SEQ ID NO: 9185 - protein, 9 aa, HIV-1
AQEEEEVGF

SEQ ID NO: 9186 - protein, 9 aa, HIV-1
EEEEVGFPV

SEQ ID NO: 9187 - protein, 9 aa, HIV-1
VGFPVTPQV

SEQ ID NO: 9188 - protein, 9 aa, HIV-1
FPVTPQVPL

SEQ ID NO: 9189 - protein, 9 aa, HIV-1
PVTPQVPLR

SEQ ID NO: 9190 - protein, 9 aa, HIV-1
TPQVPLRPM

SEQ ID NO: 9191 - protein, 9 aa, HIV-1
QVPLRPMTY

SEQ ID NO: 9192 - protein, 9 aa, HIV-1
VPLRPMTYK

SEQ ID NO: 9193 - protein, 9 aa, HIV-1
PLRPMTYKA

SEQ ID NO: 9194 - protein, 9 aa, HIV-1
RPMTYKAAV

SEQ ID NO: 9195 - protein, 9 aa, HIV-1
MTYKAAVDL

SEQ ID NO: 9196 - protein, 9 aa, HIV-1
KAAVDLSHF

SEQ ID NO: 9197 - protein, 9 aa, HIV-1
AAVDLSHFL

SEQ ID NO: 9198 - protein, 9 aa, HIV-1
AVDLSHFLK

SEQ ID NO: 9199 - protein, 9 aa, HIV-1
DLSHFLKEK

SEQ ID NO: 9200 - protein, 9 aa, HIV-1
HFLKEKGGL

SEQ ID NO: 9201 - protein, 9 aa, HIV-1
KEKGGLEGL

SEQ ID NO: 9202 - protein, 9 aa, HIV-1
GLEGLIHSQ

SEQ ID NO: 9203 - protein, 9 aa, HIV-1
RQDILDLWI

SEQ ID NO: 9204 - protein, 9 aa, HIV-1
ILDLWIYHT

SEQ ID NO: 9205 - protein, 9 aa, HIV-1
LWIYHTQGY

SEQ ID NO: 9206 - protein, 9 aa, HIV-1
WIYHTQGYF

SEQ ID NO: 9207 - protein, 9 aa, HIV-1
HTQGYFPDW

SEQ ID NO: 9208 - protein, 9 aa, HIV-1
GYFPDWQNY

SEQ ID NO: 9209 - protein, 9 aa, HIV-1
FPDWQNYTP

SEQ ID NO: 9210 - protein, 9 aa, HIV-1
NYTPGPGVR

SEQ ID NO: 9211 - protein, 9 aa, HIV-1
YTPGPGVRY

SEQ ID NO: 9212 - protein, 9 aa, HIV-1
VRYPLTFGW

SEQ ID NO: 9213 - protein, 9 aa, HIV-1
YPLTFGWCY

SEQ ID NO: 9214 - protein, 9 aa, HIV-1
PLTFGWCYK

SEQ ID NO: 9215 - protein, 9 aa, HIV-1
LTFGWCYKL

SEQ ID NO: 9216 - protein, 9 aa, HIV-1
KLVPVEPDK

SEQ ID NO: 9217 - protein, 9 aa, HIV-1
ENTSLLHPV

SEQ ID NO: 9218 - protein, 9 aa, HIV-1
GMDDPEREV

SEQ ID NO: 9219 - protein, 9 aa, HIV-1
DPEREVLEW

SEQ ID NO: 9220 - protein, 9 aa, HIV-1
EVLEWRFDS

SEQ ID NO: 9221 - protein, 9 aa, HIV-1
VLEWRFDSR

SEQ ID NO: 9222 - protein, 9 aa, HIV-1
LEWRFDSRL

SEQ ID NO: 9223 - protein, 9 aa, HIV-1
WRFDSRLAF

SEQ ID NO: 9224 - protein, 9 aa, HIV-1
RFDSRLAFH

SEQ ID NO: 9225 - protein, 9 aa, HIV-1
DSRLAFHHV

SEQ ID NO: 9226 - protein, 9 aa, HIV-1
RLAFHHVAR

SEQ ID NO: 9227 - protein, 9 aa, HIV-1
AFHHVAREL

SEQ ID NO: 9228 - protein, 9 aa, HIV-1
VARELHPEY

SEQ ID NO: 9229 - protein, 9 aa, HIV-1
RELHPEYFK

SEQ ID NO: 9230 - protein, 10 aa, HIV-1
KWSKSSVIGW

SEQ ID NO: 9231 - protein, 10 aa, HIV-1
KSSVIGWPTV

SEQ ID NO: 9232 - protein, 10 aa, HIV-1
SSVIGWPTVR

SEQ ID NO: 9233 - protein, 10 aa, HIV-1
VIGWPTVRER

SEQ ID NO: 9234 - protein, 10 aa, HIV-1
AEPAADRVGA

SEQ ID NO: 9235 - protein, 10 aa, HIV-1
EPAADRVGAA

SEQ ID NO: 9236 - protein, 10 aa, HIV-1
NTAATNAACA

SEQ ID NO: 9237 - protein, 10 aa, HIV-1
TAATNAACAW

SEQ ID NO: 9238 - protein, 10 aa, HIV-1
WLEAQEEEEV

SEQ ID NO: 9239 - protein, 10 aa, HIV-1
EAQEEEEVGF

SEQ ID NO: 9240 - protein, 10 aa, HIV-1
EVGFPVTPQV

SEQ ID NO: 9241 - protein, 10 aa, HIV-1
FPVTPQVPLR

SEQ ID NO: 9242 - protein, 10 aa, HIV-1
VTPQVPLRPM

SEQ ID NO: 9243 - protein, 10 aa, HIV-1
PQVPLRPMTY

SEQ ID NO: 9244 - protein, 10 aa, HIV-1
QVPLRPMTYK

SEQ ID NO: 9245 - protein, 10 aa, HIV-1
VPLRPMTYKA

SEQ ID NO: 9246 - protein, 10 aa, HIV-1
PLRPMTYKAA

SEQ ID NO: 9247 - protein, 10 aa, HIV-1
RPMTYKAAVD

SEQ ID NO: 9248 - protein, 10 aa, HIV-1
MTYKAAVDLS

SEQ ID NO: 9249 - protein, 10 aa, HIV-1
KAAVDLSHFL

SEQ ID NO: 9250 - protein, 10 aa, HIV-1
AAVDLSHFLK

SEQ ID NO: 9251 - protein, 10 aa, HIV-1
GLEGLIHSQR

SEQ ID NO: 9252 - protein, 10 aa, HIV-1
IHSQRRQDIL

SEQ ID NO: 9253 - protein, 10 aa, HIV-1
RRQDILDLWI

SEQ ID NO: 9254 - protein, 10 aa, HIV-1
RQDILDLWIY

SEQ ID NO: 9255 - protein, 10 aa, HIV-1
DILDLWIYHT

SEQ ID NO: 9256 - protein, 10 aa, HIV-1
ILDLWIYHTQ

SEQ ID NO: 9257 - protein, 10 aa, HIV-1
DLWIYHTQGY

SEQ ID NO: 9258 - protein, 10 aa, HIV-1
LWIYHTQGYF

SEQ ID NO: 9259 - protein, 10 aa, HIV-1
FPDWQNYTPG

SEQ ID NO: 9260 - protein, 10 aa, HIV-1
WQNYTPGPGV

SEQ ID NO: 9261 - protein, 10 aa, HIV-1
NYTPGPGVRY

SEQ ID NO: 9262 - protein, 10 aa, HIV-1
TPGPGVRYPL

SEQ ID NO: 9263 - protein, 10 aa, HIV-1
GPGVRYPLTF

SEQ ID NO: 9264 - protein, 10 aa, HIV-1
RYPLTFGWCY

SEQ ID NO: 9265 - protein, 10 aa, HIV-1
YPLTFGWCYK

SEQ ID NO: 9266 - protein, 10 aa, HIV-1
PLTFGWCYKL

SEQ ID NO: 9267 - protein, 10 aa, HIV-1
LTFGWCYKLV

SEQ ID NO: 9268 - protein, 10 aa, HIV-1
FGWCYKLVPV

SEQ ID NO: 9269 - protein, 10 aa, HIV-1
KLVPVEPDKI

SEQ ID NO: 9270 - protein, 10 aa, HIV-1
GENTSLLHPV

SEQ ID NO: 9271 - protein, 10 aa, HIV-1
NTSLLHPVSL

SEQ ID NO: 9272 - protein, 10 aa, HIV-1
LLHPVSLHGM

SEQ ID NO: 9273 - protein, 10 aa, HIV-1
SLHGMDDPER

SEQ ID NO: 9274 - protein, 10 aa, HIV-1
HGMDDPEREV

SEQ ID NO: 9275 - protein, 10 aa, HIV-1
GMDDPEREVL

SEQ ID NO: 9276 - protein, 10 aa, HIV-1
PEREVLEWRF

SEQ ID NO: 9277 - protein, 10 aa, HIV-1
EVLEWRFDSR

SEQ ID NO: 9278 - protein, 10 aa, HIV-1
VLEWRFDSRL

SEQ ID NO: 9279 - protein, 10 aa, HIV-1
EWRFDSRLAF

SEQ ID NO: 9280 - protein, 10 aa, HIV-1
WRFDSRLAFH

SEQ ID NO: 9281 - protein, 10 aa, HIV-1
SRLAFHHVAR

SEQ ID NO: 9282 - protein, 10 aa, HIV-1
LAFHHVAREL

SEQ ID NO: 9283 - protein, 10 aa, HIV-1
HVARELHPEY

SEQ ID NO: 9284 - protein, 11 aa, HIV-1
SKSSVIGWPTV

SEQ ID NO: 9285 - protein, 11 aa, HIV-1
KSSVIGWPTVR

SEQ ID NO: 9286 - protein, 11 aa, HIV-1
SVIGWPTVRER

SEQ ID NO: 9287 - protein, 11 aa, HIV-1
WPTVRERMRRA

SEQ ID NO: 9288 - protein, 11 aa, HIV-1
RMRRAEPAADR

SEQ ID NO: 9289 - protein, 11 aa, HIV-1
AEPAADRVGAA

SEQ ID NO: 9290 - protein, 11 aa, HIV-1
EPAADRVGAAS

SEQ ID NO: 9291 - protein, 11 aa, HIV-1
RVGAASRDLEK

SEQ ID NO: 9292 - protein, 11 aa, HIV-1
TSSNTAATNAA

SEQ ID NO: 9293 - protein, 11 aa, HIV-1
NTAATNAACAW

SEQ ID NO: 9294 - protein, 11 aa, HIV-1
TAATNAACAWL

SEQ ID NO: 9295 - protein, 11 aa, HIV-1
LEAQEEEEVGF

SEQ ID NO: 9296 - protein, 11 aa, HIV-1
AQEEEEVGFPV

SEQ ID NO: 9297 - protein, 11 aa, HIV-1
EEVGFPVTPQV

SEQ ID NO: 9298 - protein, 11 aa, HIV-1
FPVTPQVPLRP

SEQ ID NO: 9299 - protein, 11 aa, HIV-1
PVTPQVPLRPM

SEQ ID NO: 9300 - protein, 11 aa, HIV-1
TPQVPLRPMTY

SEQ ID NO: 9301 - protein, 11 aa, HIV-1
QVPLRPMTYKA

SEQ ID NO: 9302 - protein, 11 aa, HIV-1
VPLRPMTYKAA

SEQ ID NO: 9303 - protein, 11 aa, HIV-1
PLRPMTYKAAV

SEQ ID NO: 9304 - protein, 11 aa, HIV-1
RPMTYKAAVDL

SEQ ID NO: 9305 - protein, 11 aa, HIV-1
MTYKAAVDLSH

SEQ ID NO: 9306 - protein, 11 aa, HIV-1
TYKAAVDLSHF

SEQ ID NO: 9307 - protein, 11 aa, HIV-1
YKAAVDLSHFL

SEQ ID NO: 9308 - protein, 11 aa, HIV-1
KAAVDLSHFLK

SEQ ID NO: 9309 - protein, 11 aa, HIV-1
AVDLSHFLKEK

SEQ ID NO: 9310 - protein, 11 aa, HIV-1
FLKEKGGLEGL

SEQ ID NO: 9311 - protein, 11 aa, HIV-1
GLIHSQRRQDI

SEQ ID NO: 9312 - protein, 11 aa, HIV-1
RRQDILDLWIY

SEQ ID NO: 9313 - protein, 11 aa, HIV-1
DILDLWIYHTQ

SEQ ID NO: 9314 - protein, 11 aa, HIV-1
ILDLWIYHTQG

SEQ ID NO: 9315 - protein, 11 aa, HIV-1
LDLWIYHTQGY

SEQ ID NO: 9316 - protein, 11 aa, HIV-1
IYHTQGYFPDW

SEQ ID NO: 9317 - protein, 11 aa, HIV-1
FPDWQNYTPGP

SEQ ID NO: 9318 - protein, 11 aa, HIV-1
WQNYTPGPGVR

SEQ ID NO: 9319 - protein, 11 aa, HIV-1
YTPGPGVRYPL

SEQ ID NO: 9320 - protein, 11 aa, HIV-1
VRYPLTFGWCY

SEQ ID NO: 9321 - protein, 11 aa, HIV-1
RYPLTFGWCYK

SEQ ID NO: 9322 - protein, 11 aa, HIV-1
YPLTFGWCYKL

SEQ ID NO: 9323 - protein, 11 aa, HIV-1
PLTFGWCYKLV

SEQ ID NO: 9324 - protein, 11 aa, HIV-1
CYKLVPVEPDK

SEQ ID NO: 9325 - protein, 11 aa, HIV-1
VPVEPDKIEEA

SEQ ID NO: 9326 - protein, 11 aa, HIV-1
SLLHPVSLHGM

SEQ ID NO: 9327 - protein, 11 aa, HIV-1
HGMDDPEREVL

SEQ ID NO: 9328 - protein, 11 aa, HIV-1
GMDDPEREVLE

SEQ ID NO: 9329 - protein, 11 aa, HIV-1
DPEREVLEWRF

SEQ ID NO: 9330 - protein, 11 aa, HIV-1
EVLEWRFDSRL

SEQ ID NO: 9331 - protein, 11 aa, HIV-1
VLEWRFDSRLA

SEQ ID NO: 9332 - protein, 11 aa, HIV-1
LEWRFDSRLAF

SEQ ID NO: 9333 - protein, 11 aa, HIV-1
WRFDSRLAFHH

SEQ ID NO: 9334 - protein, 11 aa, HIV-1
RFDSRLAFHHV

SEQ ID NO: 9335 - protein, 11 aa, HIV-1
DSRLAFHHVAR

SEQ ID NO: 9336 - protein, 11 aa, HIV-1
RLAFHHVAREL

SEQ ID NO: 9337 - protein, 11 aa, HIV-1
HVARELHPEYF

SEQ ID NO: 9338 - protein, 11 aa, HIV-1
VARELHPEYFK

SEQ ID NO: 9339 - protein, 15 aa, HIV-1
ADRVGAASRDLEKHG

SEQ ID NO: 9340 - protein, 9 aa, HIV-1
RVGAASRDL

SEQ ID NO: 9341 - protein, 15 aa, HIV-1
AEPAADRVGAASRDL

SEQ ID NO: 9342 - protein, 9 aa, HIV-1
AADRVGAAS

SEQ ID NO: 9343 - protein, 15 aa, HIV-1
AITSSNTAATNAACA

SEQ ID NO: 9344 - protein, 9 aa, HIV-1
ITSSNTAAT

SEQ ID NO: 9345 - protein, 15 aa, HIV-1
ASRDLEKHGAITSSN

SEQ ID NO: 9346 - protein, 9 aa, HIV-1
LEKHGAITS

SEQ ID NO: 9347 - protein, 15 aa, HIV-1
CYKLVPVEPDKIEEA

SEQ ID NO: 9348 - protein, 9 aa, HIV-1
YKLVPVEPD

SEQ ID NO: 9349 - protein, 15 aa, HIV-1
DDPEREVLEWRFDSR

SEQ ID NO: 9350 - protein, 9 aa, HIV-1
PEREVLEWR

SEQ ID NO: 9351 - protein, 15 aa, HIV-1
DLEKHGAITSSNTAA

SEQ ID NO: 9352 - protein, 9 aa, HIV-1
LEKHGAITS

SEQ ID NO: 9353 - protein, 15 aa, HIV-1
DPEREVLEWRFDSRL

SEQ ID NO: 9354 - protein, 9 aa, HIV-1
VLEWRFDSR

SEQ ID NO: 9355 - protein, 15 aa, HIV-1
DSRLAFHHVARELHP

SEQ ID NO: 9356 - protein, 9 aa, HIV-1
FHHVARELH

SEQ ID NO: 9357 - protein, 15 aa, HIV-1
DWQNYTPGPGVRYPL

SEQ ID NO: 9358 - protein, 9 aa, HIV-1
YTPGPGVRY

SEQ ID NO: 9359 - protein, 15 aa, HIV-1
EEVGFPVTPQVPLRP

SEQ ID NO: 9360 - protein, 9 aa, HIV-1
GFPVTPQVP

SEQ ID NO: 9361 - protein, 15 aa, HIV-1
EEVGFPVTPQVPLRP

SEQ ID NO: 9362 - protein, 9 aa, HIV-1
VGFPVTPQV

SEQ ID NO: 9363 - protein, 15 aa, HIV-1
EKHGAITSSNTAATN

SEQ ID NO: 9364 - protein, 9 aa, HIV-1
ITSSNTAAT

SEQ ID NO: 9365 - protein, 15 aa, HIV-1
ENTSLLHPVSLHGMD

SEQ ID NO: 9366 - protein, 9 aa, HIV-1
LHPVSLHGM

SEQ ID NO: 9367 - protein, 15 aa, HIV-1
ENTSLLHPVSLHGMD

SEQ ID NO: 9368 - protein, 9 aa, HIV-1
LLHPVSLHG

SEQ ID NO: 9369 - protein, 15 aa, HIV-1
EPAADRVGAASRDLE

SEQ ID NO: 9370 - protein, 9 aa, HIV-1
RVGAASRDL

SEQ ID NO: 9371 - protein, 15 aa, HIV-1
EREVLEWRFDSRLAF

SEQ ID NO: 9372 - protein, 9 aa, HIV-1
LEWRFDSRL

SEQ ID NO: 9373 - protein, 15 aa, HIV-1
EREVLEWRFDSRLAF

SEQ ID NO: 9374 - protein, 9 aa, HIV-1
VLEWRFDSR

SEQ ID NO: 9375 - protein, 15 aa, HIV-1
ERMRRAEPAADRVGA

SEQ ID NO: 9376 - protein, 9 aa, HIV-1
MRRAEPAAD

SEQ ID NO: 9377 - protein, 15 aa, HIV-1
EVGFPVTPQVPLRPM

SEQ ID NO: 9378 - protein, 9 aa, HIV-1
VTPQVPLRP

SEQ ID NO: 9379 - protein, 15 aa, HIV-1
EVLEWRFDSRLAFHH

SEQ ID NO: 9380 - protein, 9 aa, HIV-1
VLEWRFDSR

SEQ ID NO: 9381 - protein, 15 aa, HIV-1
EVLEWRFDSRLAFHH

SEQ ID NO: 9382 - protein, 9 aa, HIV-1
WRFDSRLAF

SEQ ID NO: 9383 - protein, 15 aa, HIV-1
EWRFDSRLAFHHVAR

SEQ ID NO: 9384 - protein, 9 aa, HIV-1
WRFDSRLAF

SEQ ID NO: 9385 - protein, 15 aa, HIV-1
FDSRLAFHHVARELH

SEQ ID NO: 9386 - protein, 9 aa, HIV-1
FDSRLAFHH

SEQ ID NO: 9387 - protein, 15 aa, HIV-1
FGWCYKLVPVEPDKI

SEQ ID NO: 9388 - protein, 9 aa, HIV-1
YKLVPVEPD

SEQ ID NO: 9389 - protein, 15 aa, HIV-1
FPDWQNYTPGPGVRY

SEQ ID NO: 9390 - protein, 9 aa, HIV-1
FPDWQNYTP

SEQ ID NO: 9391 - protein, 15 aa, HIV-1
FPDWQNYTPGPGVRY

SEQ ID NO: 9392 - protein, 9 aa, HIV-1
WQNYTPGPG

SEQ ID NO: 9393 - protein, 15 aa, HIV-1
FPVTPQVPLRPMTYK

SEQ ID NO: 9394 - protein, 9 aa, HIV-1
VTPQVPLRP

SEQ ID NO: 9395 - protein, 15 aa, HIV-1
GAITSSNTAATNAAC

SEQ ID NO: 9396 - protein, 9 aa, HIV-1
ITSSNTAAT

SEQ ID NO: 9397 - protein, 15 aa, HIV-1
GENTSLLHPVSLHGM

SEQ ID NO: 9398 - protein, 9 aa, HIV-1
LLHPVSLHG

SEQ ID NO: 9399 - protein, 15 aa, HIV-1
GFPVTPQVPLRPMTY

SEQ ID NO: 9400 - protein, 9 aa, HIV-1
VTPQVPLRP

SEQ ID NO: 9401 - protein, 15 aa, HIV-1
GWCYKLVPVEPDKIE

SEQ ID NO: 9402 - protein, 9 aa, HIV-1
YKLVPVEPD

SEQ ID NO: 9403 - protein, 15 aa, HIV-1
GYFPDWQNYTPGPGV

SEQ ID NO: 9404 - protein, 9 aa, HIV-1
FPDWQNYTP

SEQ ID NO: 9405 - protein, 15 aa, HIV-1
GYFPDWQNYTPGPGV

SEQ ID NO: 9406 - protein, 9 aa, HIV-1
WQNYTPGPG

SEQ ID NO: 9407 - protein, 15 aa, HIV-1
HGAITSSNTAATNAA

SEQ ID NO: 9408 - protein, 9 aa, HIV-1
ITSSNTAAT

SEQ ID NO: 9409 - protein, 15 aa, HIV-1
HTQGYFPDWQNYTPG

SEQ ID NO: 9410 - protein, 9 aa, HIV-1
QGYFPDWQN

SEQ ID NO: 9411 - protein, 15 aa, HIV-1
HTQGYFPDWQNYTPG

SEQ ID NO: 9412 - protein, 9 aa, HIV-1
YFPDWQNYT

SEQ ID NO: 9413 - protein, 15 aa, HIV-1
ITSSNTAATNAACAW

SEQ ID NO: 9414 - protein, 9 aa, HIV-1
ITSSNTAAT

SEQ ID NO: 9415 - protein, 15 aa, HIV-1
IYHTQGYFPDWQNYT

SEQ ID NO: 9416 - protein, 9 aa, HIV-1
GYFPDWQNY

SEQ ID NO: 9417 - protein, 15 aa, HIV-1
IYHTQGYFPDWQNYT

SEQ ID NO: 9418 - protein, 9 aa, HIV-1
QGYFPDWQN

SEQ ID NO: 9419 - protein, 15 aa, HIV-1
KGENTSLLHPVSLHG

SEQ ID NO: 9420 - protein, 9 aa, HIV-1
NTSLLHPVS

SEQ ID NO: 9421 - protein, 15 aa, HIV-1
KGENTSLLHPVSLHG

SEQ ID NO: 9422 - protein, 9 aa, HIV-1
SLLHPVSLH

SEQ ID NO: 9423 - protein, 15 aa, HIV-1
KHGAITSSNTAATNA

SEQ ID NO: 9424 - protein, 9 aa, HIV-1
ITSSNTAAT

SEQ ID NO: 9425 - protein, 15 aa, HIV-1
KSSVIGWPTVRERMR

SEQ ID NO: 9426 - protein, 9 aa, HIV-1
VIGWPTVRE

SEQ ID NO: 9427 - protein, 15 aa, HIV-1
KWSKSSVIGWPTVRE

SEQ ID NO: 9428 - protein, 9 aa, HIV-1
KSSVIGWPT

SEQ ID NO: 9429 - protein, 15 aa, HIV-1
KWSKSSVIGWPTVRE

SEQ ID NO: 9430 - protein, 9 aa, HIV-1
KWSKSSVIG

SEQ ID NO: 9431 - protein, 15 aa, HIV-1
LAFHHVARELHPEYF

SEQ ID NO: 9432 - protein, 9 aa, HIV-1
FHHVARELH

SEQ ID NO: 9433 - protein, 15 aa, HIV-1
LEKHGAITSSNTAAT

SEQ ID NO: 9434 - protein, 9 aa, HIV-1
GAITSSNTA

SEQ ID NO: 9435 - protein, 15 aa, HIV-1
LEKHGAITSSNTAAT

SEQ ID NO: 9436 - protein, 9 aa, HIV-1
HGAITSSNT

SEQ ID NO: 9437 - protein, 15 aa, HIV-1
LEWRFDSRLAFHHVA

SEQ ID NO: 9438 - protein, 9 aa, HIV-1
WRFDSRLAF

SEQ ID NO: 9439 - protein, 15 aa, HIV-1
LHPVSLHGMDDPERE

SEQ ID NO: 9440 - protein, 9 aa, HIV-1
LHGMDDPER

SEQ ID NO: 9441 - protein, 15 aa, HIV-1
LHPVSLHGMDDPERE

SEQ ID NO: 9442 - protein, 9 aa, HIV-1
LHPVSLHGM

SEQ ID NO: 9443 - protein, 15 aa, HIV-1
LLHPVSLHGMDDPER

SEQ ID NO: 9444 - protein, 9 aa, HIV-1
LHPVSLHGM

SEQ ID NO: 9445 - protein, 15 aa, HIV-1
LLHPVSLHGMDDPER

SEQ ID NO: 9446 - protein, 9 aa, HIV-1
LLHPVSLHG

SEQ ID NO: 9447 - protein, 15 aa, HIV-1
LRPMTYKAAVDLSHF

SEQ ID NO: 9448 - protein, 9 aa, HIV-1
MTYKAAVDL

SEQ ID NO: 9449 - protein, 15 aa, HIV-1
LTFGWCYKLVPVEPD

SEQ ID NO: 9450 - protein, 9 aa, HIV-1
GWCYKLVPV

SEQ ID NO: 9451 - protein, 15 aa, HIV-1
MGGKWSKSSVIGWPT

SEQ ID NO: 9452 - protein, 9 aa, HIV-1
MGGKWSKSS

SEQ ID NO: 9453 - protein, 15 aa, HIV-1
MTYKAAVDLSHFLKE

SEQ ID NO: 9454 - protein, 9 aa, HIV-1
MTYKAAVDL

SEQ ID NO: 9455 - protein, 15 aa, HIV-1
NTSLLHPVSLHGMDD

SEQ ID NO: 9456 - protein, 9 aa, HIV-1
LHPVSLHGM

SEQ ID NO: 9457 - protein, 15 aa, HIV-1
NTSLLHPVSLHGMDD

SEQ ID NO: 9458 - protein, 9 aa, HIV-1
LLHPVSLHG

SEQ ID NO: 9459 - protein, 15 aa, HIV-1
NYTPGPGVRYPLTFG

SEQ ID NO: 9460 - protein, 9 aa, HIV-1
YTPGPGVRY

SEQ ID NO: 9461 - protein, 15 aa, HIV-1
PDWQNYTPGPGVRYP

SEQ ID NO: 9462 - protein, 9 aa, HIV-1
WQNYTPGPG

SEQ ID NO: 9463 - protein, 15 aa, HIV-1
PDWQNYTPGPGVRYP

SEQ ID NO: 9464 - protein, 9 aa, HIV-1
YTPGPGVRY

SEQ ID NO: 9465 - protein, 15 aa, HIV-1
PEREVLEWRFDSRLA

SEQ ID NO: 9466 - protein, 9 aa, HIV-1
VLEWRFDSR

SEQ ID NO: 9467 - protein, 15 aa, HIV-1
PLRPMTYKAAVDLSH

SEQ ID NO: 9468 - protein, 9 aa, HIV-1
MTYKAAVDL

SEQ ID NO: 9469 - protein, 15 aa, HIV-1
PMTYKAAVDLSHFLK

SEQ ID NO: 9470 - protein, 9 aa, HIV-1
MTYKAAVDL

SEQ ID NO: 9471 - protein, 15 aa, HIV-1
PQVPLRPMTYKAAVD

SEQ ID NO: 9472 - protein, 9 aa, HIV-1
LRPMTYKAA

SEQ ID NO: 9473 - protein, 15 aa, HIV-1
PTVRERMRRAEPAAD

SEQ ID NO: 9474 - protein, 9 aa, HIV-1
ERMRRAEPA

SEQ ID NO: 9475 - protein, 15 aa, HIV-1
PVTPQVPLRPMTYKA

SEQ ID NO: 9476 - protein, 9 aa, HIV-1
VPLRPMTYK

SEQ ID NO: 9477 - protein, 15 aa, HIV-1
PVTPQVPLRPMTYKA

SEQ ID NO: 9478 - protein, 9 aa, HIV-1
VTPQVPLRP

SEQ ID NO: 9479 - protein, 15 aa, HIV-1
PAADRVGAASRDLEK

SEQ ID NO: 9480 - protein, 9 aa, HIV-1
RVGAASRDL

SEQ ID NO: 9481 - protein, 15 aa, HIV-1
QGYFPDWQNYTPGPG

SEQ ID NO: 9482 - protein, 9 aa, HIV-1
QGYFPDWQN

SEQ ID NO: 9483 - protein, 15 aa, HIV-1
QGYFPDWQNYTPGPG

SEQ ID NO: 9484 - protein, 9 aa, HIV-1
YFPDWQNYT

SEQ ID NO: 9485 - protein, 15 aa, HIV-1
QNYTPGPGVRYPLTF

SEQ ID NO: 9486 - protein, 9 aa, HIV-1
YTPGPGVRY

SEQ ID NO: 9487 - protein, 15 aa, HIV-1
QVPLRPMTYKAAVDL

SEQ ID NO: 9488 - protein, 9 aa, HIV-1
LRPMTYKAA

SEQ ID NO: 9489 - protein, 15 aa, HIV-1
RDLEKHGAITSSNTA

SEQ ID NO: 9490 - protein, 9 aa, HIV-1
LEKHGAITS

SEQ ID NO: 9491 - protein, 15 aa, HIV-1
RERMRRAEPAADRVG

SEQ ID NO: 9492 - protein, 9 aa, HIV-1
MRRAEPAAD

SEQ ID NO: 9493 - protein, 15 aa, HIV-1
REVLEWRFDSRLAFH

SEQ ID NO: 9494 - protein, 9 aa, HIV-1
VLEWRFDSR

SEQ ID NO: 9495 - protein, 15 aa, HIV-1
REVLEWRFDSRLAFH

SEQ ID NO: 9496 - protein, 9 aa, HIV-1
WRFDSRLAF

SEQ ID NO: 9497 - protein, 15 aa, HIV-1
RLAFHHVARELHPEY

SEQ ID NO: 9498 - protein, 9 aa, HIV-1
FHHVARELH

SEQ ID NO: 9499 - protein, 15 aa, HIV-1
RPMTYKAAVDLSHFL

SEQ ID NO: 9500 - protein, 9 aa, HIV-1
MTYKAAVDL

SEQ ID NO: 9501 - protein, 15 aa, HIV-1
SKSSVIGWPTVRERM

SEQ ID NO: 9502 - protein, 9 aa, HIV-1
VIGWPTVRE

SEQ ID NO: 9503 - protein, 15 aa, HIV-1
SLLHPVSLHGMDDPE

SEQ ID NO: 9504 - protein, 9 aa, HIV-1
LHPVSLHGM

SEQ ID NO: 9505 - protein, 15 aa, HIV-1
SLLHPVSLHGMDDPE

SEQ ID NO: 9506 - protein, 9 aa, HIV-1
LLHPVSLHG

SEQ ID NO: 9507 - protein, 15 aa, HIV-1
SRDLEKHGAITSSNT

SEQ ID NO: 9508 - protein, 9 aa, HIV-1
LEKHGAITS

SEQ ID NO: 9509 - protein, 15 aa, HIV-1
SRLAFHHVARELHPE

SEQ ID NO: 9510 - protein, 9 aa, HIV-1
FHHVARELH

SEQ ID NO: 9511 - protein, 15 aa, HIV-1
SSVIGWPTVRERMRR

SEQ ID NO: 9512 - protein, 9 aa, HIV-1
VIGWPTVRE

SEQ ID NO: 9513 - protein, 15 aa, HIV-1
SVIGWPTVRERMRRA

SEQ ID NO: 9514 - protein, 9 aa, HIV-1
VIGWPTVRE

SEQ ID NO: 9515 - protein, 15 aa, HIV-1
TFGWCYKLVPVEPDK

SEQ ID NO: 9516 - protein, 9 aa, HIV-1
YKLVPVEPD

SEQ ID NO: 9517 - protein, 15 aa, HIV-1
TPQVPLRPMTYKAAV

SEQ ID NO: 9518 - protein, 9 aa, HIV-1
LRPMTYKAA

SEQ ID NO: 9519 - protein, 15 aa, HIV-1
TPQVPLRPMTYKAAV

SEQ ID NO: 9520 - protein, 9 aa, HIV-1
VPLRPMTYK

SEQ ID NO: 9521 - protein, 15 aa, HIV-1
TQGYFPDWQNYTPGP

SEQ ID NO: 9522 - protein, 9 aa, HIV-1
QGYFPDWQN

SEQ ID NO: 9523 - protein, 15 aa, HIV-1
TQGYFPDWQNYTPGP

SEQ ID NO: 9524 - protein, 9 aa, HIV-1
YFPDWQNYT

SEQ ID NO: 9525 - protein, 15 aa, HIV-1
TSLLHPVSLHGMDDP

SEQ ID NO: 9526 - protein, 9 aa, HIV-1
LHPVSLHGM

SEQ ID NO: 9527 - protein, 15 aa, HIV-1
TSLLHPVSLHGMDDP

SEQ ID NO: 9528 - protein, 9 aa, HIV-1
LLHPVSLHG

SEQ ID NO: 9529 - protein, 15 aa, HIV-1
TVRERMRRAEPAADR

SEQ ID NO: 9530 - protein, 9 aa, HIV-1
MRRAEPAAD

SEQ ID NO: 9531 - protein, 15 aa, HIV-1
VGFPVTPQVPLRPMT

SEQ ID NO: 9532 - protein, 9 aa, HIV-1
VTPQVPLRP

SEQ ID NO: 9533 - protein, 15 aa, HIV-1
VIGWPTVRERMRRAE

SEQ ID NO: 9534 - protein, 9 aa, HIV-1
VIGWPTVRE

SEQ ID NO: 9535 - protein, 15 aa, HIV-1
VLEWRFDSRLAFHHV

SEQ ID NO: 9536 - protein, 9 aa, HIV-1
VLEWRFDSR

SEQ ID NO: 9537 - protein, 15 aa, HIV-1
VLEWRFDSRLAFHHV

SEQ ID NO: 9538 - protein, 9 aa, HIV-1
WRFDSRLAF

SEQ ID NO: 9539 - protein, 15 aa, HIV-1
VPLRPMTYKAAVDLS

SEQ ID NO: 9540 - protein, 9 aa, HIV-1
LRPMTYKAA

SEQ ID NO: 9541 - protein, 15 aa, HIV-1
VRERMRRAEPAADRV

SEQ ID NO: 9542 - protein, 9 aa, HIV-1
MRRAEPAAD

SEQ ID NO: 9543 - protein, 15 aa, HIV-1
VTPQVPLRPMTYKAA

SEQ ID NO: 9544 - protein, 9 aa, HIV-1
VPLRPMTYK

SEQ ID NO: 9545 - protein, 15 aa, HIV-1
VTPQVPLRPMTYKAA

SEQ ID NO: 9546 - protein, 9 aa, HIV-1
VTPQVPLRP

SEQ ID NO: 9547 - protein, 15 aa, HIV-1
WCYKLVPVEPDKIEE

SEQ ID NO: 9548 - protein, 9 aa, HIV-1
YKLVPVEPD

SEQ ID NO: 9549 - protein, 15 aa, HIV-1
WQNYTPGPGVRYPLT

SEQ ID NO: 9550 - protein, 9 aa, HIV-1
YTPGPGVRY

SEQ ID NO: 9551 - protein, 15 aa, HIV-1
WRFDSRLAFHHVARE

SEQ ID NO: 9552 - protein, 9 aa, HIV-1
WRFDSRLAF

SEQ ID NO: 9553 - protein, 15 aa, HIV-1
WSKSSVIGWPTVRER

SEQ ID NO: 9554 - protein, 9 aa, HIV-1
VIGWPTVRE

SEQ ID NO: 9555 - protein, 15 aa, HIV-1
YFPDWQNYTPGPGVR

SEQ ID NO: 9556 - protein, 9 aa, HIV-1
WQNYTPGPG

SEQ ID NO: 9557 - protein, 15 aa, HIV-1
YHTQGYFPDWQNYTP

SEQ ID NO: 9558 - protein, 9 aa, HIV-1
QGYFPDWQN

SEQ ID NO: 9559 - protein, 15 aa, HIV-1
YHTQGYFPDWQNYTP

SEQ ID NO: 9560 - protein, 9 aa, HIV-1
YFPDWQNYT

SEQ ID NO: 9561 - protein, 15 aa, HIV-1
YKLVPVEPDKIEEAN

SEQ ID NO: 9562 - protein, 9 aa, HIV-1
YKLVPVEPD

SEQ ID NO: 9563 - protein, 15 aa, HIV-1
YTPGPGVRYPLTFGW

SEQ ID NO: 9564 - protein, 9 aa, HIV-1
YTPGPGVRY

SEQ ID NO: 9565 - protein, 15 aa, HIV-1
AADRVGAASRDLEKH

SEQ ID NO: 9566 - protein, 9 aa, HIV-1
RVGAASRDL

SEQ ID NO: 9567 - protein, 15 aa, HIV-1
AASRDLEKHGAITSS

SEQ ID NO: 9568 - protein, 9 aa, HIV-1
LEKHGAITS

SEQ ID NO: 9569 - protein, 9 aa, Macaca mulatta
CTPYDINQM

SEQ ID NO: 9570 - protein, 8 aa, Macaca mulatta
KPCVKLTP

SEQ ID NO: 9571 - protein, 9 aa, Macaca mulatta
IRFPKTFGW

SEQ ID NO: 9572 - protein, 15 aa, Macaca mulatta
EFVRFDSAVGEYRAV

SEQ ID NO: 9573 - protein, 15 aa, Macaca mulatta
EFVGFDSYLGVYRPV

SEQ ID NO: 9574 - protein, 17 aa, Macaca mulatta
TREDILERERAQVDTFY

SEQ ID NO: 9575 - protein, 9 aa, Homo sapiens
IVDCLTEMY

SEQ ID NO: 9576 - protein, 9 aa, Homo sapiens
GLIQLVEGV

SEQ ID NO: 9577 - protein, 9 aa, Homo sapiens
RIAAWMATY

SEQ ID NO: 9578 - protein, 9 aa, Homo sapiens
IVTDFSVIK

SEQ ID NO: 9579 - protein, 20 aa, Homo sapiens
MNYQVSSPIYNINYYTSEPC

SEQ ID NO: 9580 - protein, 15 aa, Homo sapiens
HYAAAQWNFGNTMCQ

SEQ ID NO: 9581 - protein, 20 aa, Homo sapiens
YSSHFPYSQYQFWKNFQTLK

SEQ ID NO: 9582 - protein, 259 aa, Homo sapiens
LLQDFFNGRELNKSINPDEAVAYGAAVQAAILMGDTSGNVQDLLLLDVAPLSLGIETAGGVMTALIKRNTTIPTKQTQTFTTYSDNQPGVLIQVFEGERAMTKDNNLLGKFELTGIPPAPRGVPQIEVTFDIDANGILNVSAADKSTGKQNKITITNDKGRLSKEEIERMVQEADMYKAEDDLQREKISAKNSLESYAFNMKSSVEDDNLKGKISEEDKKRVIEKCNEAVSWLENNQLADKEEYEHQLKELEKVCNPVI

SEQ ID NO: 9583 - protein, 696 aa, HIV
MPMGSLQPLATLYLLGMLVASVLAVEQLWVTVYYGVPVWKEATTTLFCASDAKAYDTEVHNVWATHACVPTDPNPQEVKLENVTENFNMWKNNMVEQMHEDIISLWDQSLKPCVKLTPLCVTLNCTDLRNATNTTSSSWETMEKGEIKNCSFNITTSIRDKVQKEYALFYNLDVVPIDNASYRLISCNTSVITQACPKVSFEPIPIHYCAPAGFAILKCNDKKFNGTGPCTNVSTVQCTHGIRPVVSTQLLLNGSLAEEEIVIRSENFTNNAKTIIVQLNESVVINCTRPNNNTRKSINIGPGRALYTTGEIIGDIRQAHCNLSKTQWENTLEQIAIKLKEQFGNNKTIIFNPSSGGDPEIVTHSFNCGGEFFYCNSTQLFTWNDTRKLNNTGRNITLPCRIKQIINMWQEVGKAMYAPPIRGQIRCSSNITGLLLTRDGGKDTNGTEIFRPGGGDMRDNWRSELYKYKVVKIEPLGVAPTKAKRRVVQSEKSAVGLGALFLGFLGAAGSTMGAASITLTVQARQLLSGIVQQQNNLLRAIEAQQHLLQLTVWGIKQLQARVLAVERYLRDQQLLGIWGCSGKLICTTTVPWNTSWSNKSLNEIWDNMTWMKWEREIDNYTHIIYSLIEQSQNQQEKNEQELLALDKWASLWNWFDITKWLWYIKGSGYIPEAPRDGQAYVRKDGEWVLLSTFLPP

SEQ ID NO: 9584 - protein, 140 aa, SIV
WVKLVEEKKFGAEVVPGFQALSGGCTPYDINQMLNCVGEHQAAMQIIREIINEEAADWDLQHPQPGPIPAGQLRDPRGSDIAGTTSTVEEQIQWMYRQQNPIPVGNIYRRWIQLGLQKCVRMYNPTNILDVKQGPKEPFQ

SEQ ID NO: 9585 - protein, 15 aa, Homo sapiens
RFLELLKSECHFFNG

SEQ ID NO: 9586 - protein, 15 aa, Homo sapiens
RVWNLIRYIYNQEEY

SEQ ID NO: 9587 - protein, 14 aa, Homo sapiens
FLQQDKYECHFFNG

SEQ ID NO: 9588 - protein, 9 aa, Homo sapiens
IVDCLTEMY

SEQ ID NO: 9589 - protein, 9 aa, EBV
IVTDFSVIK

SEQ ID NO: 9590 - protein, 9 aa, Homo sapiens
GLIQLVEGV

SEQ ID NO: 9591 - protein, 9 aa, Homo sapiens
RIAAWMATY

SEQ ID NO: 9592 - protein, 9 aa, Homo sapiens
EYRALQLHL

1. A composition comprising one or more pharmamers.

2. The composition according to claim 1, wherein the composition is a composition for vaccination.

3. The composition according to any of claims 1-2, wherein the one or more pharmamers comprises one or more organic molecule-based pharmamers.

4. The composition according to any of claims 1-3, wherein the one or more pharmamers comprises one or more functionalized cyclic structures such as benzene rings where e.g. a benzene ring is functionalized and covalently linked to e.g. three immunologically active molecules.

5. The composition according to any of claims 1-4, wherein the one or more pharmamers comprises one or more cell-based pharmamers.

6. The composition according to any of claims 1-5, wherein the one or more pharmamers comprises one or more dendritic cells and/or one or more antigen presenting cells (APCs).

7. The composition according to any of claims 1-6, wherein the one or more pharmamers comprises one or more membrane-based pharmamers.

8. The composition according to any of claims 1-7, wherein the one or more pharmamers comprises one or more liposomes and/or micelles e.g. carrying immunologically active molecules or complexes in their membranes.

9. The composition according to any of claims 1-8, wherein the one or more pharmamers comprises one or more polymer-based pharmamers.

10. The composition according to any of claims 1-9, wherein the one or more pharmamers comprises one or more molecule constructs where immunologically active molecules or complexes are bound covalently or non-covalently to a dextran.

11. The composition according to any of claims 1-10, wherein the one or more pharmamers comprises one or more backbone/multimerisation domain(s).

12. The composition according to any of claims 1-11, wherein the one or more pharmamers comprises one or more particles such as beads.

13. The composition according to any of claims 1-12, wherein the one or more pharmamers comprises one or more solid supports with immunologically active molecules immobilized on the surface.

14. The composition according to any of claims 1-13, wherein the one or more pharmamers comprises one or more multimerization domain(s) such as one or more cells, polymers, proteins or other molecular structures, or particles and solid supports.

15. The composition according to any of claims 1-14, wherein the one or more pharmamers comprises one or more pharmamers in solid form and/or one or more pharmamers in insoluble form and/or one or more pharmamers in soluble form and/or one or more pharmamers in suspension.

16. The composition according to any of claims 1-15, wherein the one or more pharmamers has a molecular weight in the range 50,000 Da to 5,000,000 Da, such as from 50,000 Da to 4,000,000 Da; such as from 50,000 Da to 3,000,000 Da; such as from 50,000 Da to 2,000,000; such as from 50,000 Da and 1,000,000 Da, such as from 50,000 Da to 980,000; for example from 50,000 Da to 960,000; such as from 50,000 Da to 940,000; for example from 50,000 Da to 920,000; such as from 50,000 Da to 900,000; for example from 50,000 Da to 880,000; such as from 50,000 Da to 860,000; for example from 50,000 Da to 840,000; such as from 50,000 Da to 820,000; for example from 50,000 Da to 800,000; such as from 50,000 Da to 780,000; for example from 50,000 Da to 760,000; such as from 50,000 Da to 740,000; for example from 50,000 Da to 720,000; such as from 50,000 Da to 700,000; for example from 50,000 Da to 680,000; such as from 50,000 Da to 660,000; for example from 50,000 Da to 640,000; such as from 50,000 Da to 620,000; for example from 50,000 Da to 600,000; such as from 50,000 Da to 580,000; for example from 50,000 Da to 560,000; such as from 50,000 Da to 540,000; for example from 50,000 Da to 520,000; such as from 50,000 Da to 500,000; for example from 50,000 Da to 480,000; such as from 50,000 Da to 460,000; for example from 50,000 Da to 440,000; such as from 50,000 Da to 420,000; for example from 50,000 Da to 400,000; such as from 50,000 Da to 380,000; for example from 50,000 Da to 360,000; such as from 50,000 Da to 340,000; for example from 50,000 Da to 320,000; such as from 50,000 Da to 300,000; for example from 50,000 Da to 280,000; such as from 50,000 Da to 260,000; for example from 50,000 Da to 240,000; such as from 50,000 Da to 220,000; for example from 50,000 Da to 200,000; such as from 50,000 Da to 180,000; for example from 50,000 Da to 160,000; such as from 50,000 Da to 140,000; for example from 50,000 Da to 120,000; such as from 50,000 Da to 100,000; for example from 50,000 Da to 80,000; such as from 50,000 Da to 60,000; such as from 100,000 Da to 980,000; for example from 100,000 Da to 960,000; such as from 100,000 Da to 940,000; for example from 100,000 Da to 920,000; such as from 100,000 Da to 900,000; for example from 100,000 Da to 880,000; such as from 100,000 Da to 860,000; for example from 100,000 Da to 840,000; such as from 100,000 Da to 820,000; for example from 100,000 Da to 800,000; such as from 100,000 Da to 780,000; for example from 100,000 Da to 760,000; such as from 100,000 Da to 740,000; for example from 100,000 Da to 720,000; such as from 100,000 Da to 700,000; for example from 100,000 Da to 680,000; such as from 100,000 Da to 660,000; for example from 100,000 Da to 640,000; such as from 100,000 Da to 620,000; for example from 100,000 Da to 600,000; such as from 100,000 Da to 580,000; for example from 100,000 Da to 560,000; such as from 100,000 Da to 540,000; for example from 100,000 Da to 520,000; such as from 100,000 Da to 500,000; for example from 100,000 Da to 480,000; such as from 100,000 Da to 460,000; for example from 100,000 Da to 440,000; such as from 100,000 Da to 420,000; for example from 100,000 Da to 400,000; such as from 100,000 Da to 380,000; for example from 100,000 Da to 360,000; such as from 100,000 Da to 340,000; for example from 100,000 Da to 320,000; such as from 100,000 Da to 300,000; for example from 100,000 Da to 280,000; such as from 100,000 Da to 260,000; for example from 100,000 Da to 240,000; such as from 100,000 Da to 220,000; for example from 100,000 Da to 200,000; such as from 100,000 Da to 180,000; for example from 100,000 Da to 160,000; such as from 100,000 Da to 140,000; for example from 100,000 Da to 120,000; such as from 150,000 Da to 980,000; for example from 150,000 Da to 960,000; such as from 150,000 Da to 940,000; for example from 150,000 Da to 920,000; such as from 150,000 Da to 900,000; for example from 150,000 Da to 880,000; such as from 150,000 Da to 860,000; for example from 150,000 Da to 840,000; such as from 150,000 Da to 820,000; for example from 150,000 Da to 800,000; such as from 150,000 Da to 780,000; for example from 150,000 Da to 760,000; such as from 150,000 Da to 740,000; for example from 150,000 Da to 720,000; such as from 150,000 Da to 700,000; for example from 150,000 Da to 680,000; such as from 150,000 Da to 660,000; for example from 150,000 Da to 640,000; such as from 150,000 Da to 620,000; for example from 150,000 Da to 600,000; such as from 150,000 Da to 580,000; for example from 150,000 Da to 560,000; such as from 150,000 Da to 540,000; for example from 150,000 Da to 520,000; such as from 150,000 Da to 500,000; for example from 150,000 Da to 480,000; such as from 150,000 Da to 460,000; for example from 150,000 Da to 440,000; such as from 150,000 Da to 420,000; for example from 150,000 Da to 400,000; such as from 150,000 Da to 380,000; for example from 150,000 Da to 360,000; such as from 150,000 Da to 340,000; for example from 150,000 Da to 320,000; such as from 150,000 Da to 300,000; for example from 150,000 Da to 280,000; such as from 150,000 Da to 260,000; for example from 150,000 Da to 240,000; such as from 150,000 Da to 220,000; for example from 150,000 Da to 200,000; such as from 150,000 Da to 180,000; for example from 150,000 Da to 160,000.

17. The composition according to any of claims 1-16, wherein the one or more pharmamers has a molecular weight in the range 50,000 Da to 5,000,000 Da, such as from 50,000 Da to 100,000 Da, for example from 100,000 Da to 200,000 Da, such as from 200,000 Da to 300,000 Da, for example from 300,000 Da to 400,000 Da, such as from 400,000 Da to 500,000 Da, for example from 500,000 Da to 600,000 Da, such as from 600,000 Da to 700,000 Da, for example from 700,000 Da to 800,000 Da, such as from 800,000 Da to 900,000 Da, for example from 900,000 Da to 1,000,000 Da, such as from 1,000,000 Da to 1,200,000 Da, for example from 1,200,000 Da to 1,400,000 Da, such as from 1,400,000 Da to 1,600,000 Da, for example from 1,600,000 Da to 1,800,000 Da, such as from 1,800,000 Da to 2,000,000 Da, for example from 2,000,000 Da to 2,200,000 Da, such as from 2,200,000 Da to 2,400,000 Da, for example from 2,400,000 Da to 2,600,000 Da, such as from 2,600,000 Da to 2,800,000 Da, for example from 2,800,000 Da to 3,000,000 Da, such as from 3,000,000 Da to 3,200,000 Da, for example from 3,200,000 Da to 3,400,000 Da, such as from 3,400,000 Da to 3,600,000 Da, for example from 3,600,000 Da to 3,800,000 Da, such as from 3,800,000 Da to 4,000,000 Da, for example from 4,000,000 Da to 4,200,000 Da, such as from 4,200,000 Da to 4,400,000 Da, for example from 4,400,000 Da to 4,600,000 Da, such as from 4,600,000 Da to 4,800,000 Da, for example from 4,800,000 Da to 5,000,000 Da.

18. The composition according to any of claims 1-17, wherein the one or more pharmamers has an average molecular weight in the range 50,000 Da to 5,000,000 Da, such as from 50,000 Da to 4,000,000 Da; such as from 50,000 Da to 3,000,000 Da; such as from 50,000 Da to 2,000,000; such as from 50,000 Da and 1,000,000 Da, such as from 50,000 Da to 980,000; for example from 50,000 Da to 960,000; such as from 50,000 Da to 940,000; for example from 50,000 Da to 920,000; such as from 50,000 Da to 900,000; for example from 50,000 Da to 880,000; such as from 50,000 Da to 860,000; for example from 50,000 Da to 840,000; such as from 50,000 Da to 820,000; for example from 50,000 Da to 800,000; such as from 50,000 Da to 780,000; for example from 50,000 Da to 760,000; such as from 50,000 Da to 740,000; for example from 50,000 Da to 720,000; such as from 50,000 Da to 700,000; for example from 50,000 Da to 680,000; such as from 50,000 Da to 660,000; for example from 50,000 Da to 640,000; such as from 50,000 Da to 620,000; for example from 50,000 Da to 600,000; such as from 50,000 Da to 580,000; for example from 50,000 Da to 560,000; such as from 50,000 Da to 540,000; for example from 50,000 Da to 520,000; such as from 50,000 Da to 500,000; for example from 50,000 Da to 480,000; such as from 50,000 Da to 460,000; for example from 50,000 Da to 440,000; such as from 50,000 Da to 420,000; for example from 50,000 Da to 400,000; such as from 50,000 Da to 380,000; for example from 50,000 Da to 360,000; such as from 50,000 Da to 340,000; for example from 50,000 Da to 320,000; such as from 50,000 Da to 300,000; for example from 50,000 Da to 280,000; such as from 50,000 Da to 260,000; for example from 50,000 Da to 240,000; such as from 50,000 Da to 220,000; for example from 50,000 Da to 200,000; such as from 50,000 Da to 180,000; for example from 50,000 Da to 160,000; such as from 50,000 Da to 140,000; for example from 50,000 Da to 120,000; such as from 50,000 Da to 100,000; for example from 50,000 Da to 80,000; such as from 50,000 Da to 60,000; such as from 100,000 Da to 980,000; for example from 100,000 Da to 960,000; such as from 100,000 Da to 940,000; for example from 100,000 Da to 920,000; such as from 100,000 Da to 900,000; for example from 100,000 Da to 880,000; such as from 100,000 Da to 860,000; for example from 100,000 Da to 840,000; such as from 100,000 Da to 820,000; for example from 100,000 Da to 800,000; such as from 100,000 Da to 780,000; for example from 100,000 Da to 760,000; such as from 100,000 Da to 740,000; for example from 100,000 Da to 720,000; such as from 100,000 Da to 700,000; for example from 100,000 Da to 680,000; such as from 100,000 Da to 660,000; for example from 100,000 Da to 640,000; such as from 100,000 Da to 620,000; for example from 100,000 Da to 600,000; such as from 100,000 Da to 580,000; for example from 100,000 Da to 560,000; such as from 100,000 Da to 540,000; for example from 100,000 Da to 520,000; such as from 100,000 Da to 500,000; for example from 100,000 Da to 480,000; such as from 100,000 Da to 460,000; for example from 100,000 Da to 440,000; such as from 100,000 Da to 420,000; for example from 100,000 Da to 400,000; such as from 100,000 Da to 380,000; for example from 100,000 Da to 360,000; such as from 100,000 Da to 340,000; for example from 100,000 Da to 320,000; such as from 100,000 Da to 300,000; for example from 100,000 Da to 280,000; such as from 100,000 Da to 260,000; for example from 100,000 Da to 240,000; such as from 100,000 Da to 220,000; for example from 100,000 Da to 200,000; such as from 100,000 Da to 180,000; for example from 100,000 Da to 160,000; such as from 100,000 Da to 140,000; for example from 100,000 Da to 120,000; such as from 150,000 Da to 980,000; for example from 150,000 Da to 960,000; such as from 150,000 Da to 940,000; for example from 150,000 Da to 920,000; such as from 150,000 Da to 900,000; for example from 150,000 Da to 880,000; such as from 150,000 Da to 860,000; for example from 150,000 Da to 840,000; such as from 150,000 Da to 820,000; for example from 150,000 Da to 800,000; such as from 150,000 Da to 780,000; for example from 150,000 Da to 760,000; such as from 150,000 Da to 740,000; for example from 150,000 Da to 720,000; such as from 150,000 Da to 700,000; for example from 150,000 Da to 680,000; such as from 150,000 Da to 660,000; for example from 150,000 Da to 640,000; such as from 150,000 Da to 620,000; for example from 150,000 Da to 600,000; such as from 150,000 Da to 580,000; for example from 150,000 Da to 560,000; such as from 150,000 Da to 540,000; for example from 150,000 Da to 520,000; such as from 150,000 Da to 500,000; for example from 150,000 Da to 480,000; such as from 150,000 Da to 460,000; for example from 150,000 Da to 440,000; such as from 150,000 Da to 420,000; for example from 150,000 Da to 400,000; such as from 150,000 Da to 380,000; for example from 150,000 Da to 360,000; such as from 150,000 Da to 340,000; for example from 150,000 Da to 320,000; such as from 150,000 Da to 300,000; for example from 150,000 Da to 280,000; such as from 150,000 Da to 260,000; for example from 150,000 Da to 240,000; such as from 150,000 Da to 220,000; for example from 150,000 Da to 200,000; such as from 150,000 Da to 180,000; for example from 150,000 Da to 160,000.

19. The composition according to any of claims 1-18, wherein the one or more pharmamers has an average molecular weight in the range 50,000 Da to 5,000,000 Da, such as from 50,000 Da to 100,000 Da, for example from 100,000 Da to 200,000 Da, such as from 200,000 Da to 300,000 Da, for example from 300,000 Da to 400,000 Da, such as from 400,000 Da to 500,000 Da, for example from 500,000 Da to 600,000 Da, such as from 600,000 Da to 700,000 Da, for example from 700,000 Da to 800,000 Da, such as from 800,000 Da to 900,000 Da, for example from 900,000 Da to 1,000,000 Da, such as from 1,000,000 Da to 1,200,000 Da, for example from 1,200,000 Da to 1,400,000 Da, such as from 1,400,000 Da to 1,600,000 Da, for example from 1,600,000 Da to 1,800,000 Da, such as from 1,800,000 Da to 2,000,000 Da, for example from 2,000,000 Da to 2,200,000 Da, such as from 2,200,000 Da to 2,400,000 Da, for example from 2,400,000 Da to 2,600,000 Da, such as from 2,600,000 Da to 2,800,000 Da, for example from 2,800,000 Da to 3,000,000 Da, such as from 3,000,000 Da to 3,200,000 Da, for example from 3,200,000 Da to 3,400,000 Da, such as from 3,400,000 Da to 3,600,000 Da, for example from 3,600,000 Da to 3,800,000 Da, such as from 3,800,000 Da to 4,000,000 Da, for example from 4,000,000 Da to 4,200,000 Da, such as from 4,200,000 Da to 4,400,000 Da, for example from 4,400,000 Da to 4,600,000 Da, such as from 4,600,000 Da to 4,800,000 Da, for example from 4,800,000 Da to 5,000,000 Da.

20. The composition according to any of claims 1-19, wherein the one or more pharmamers has a molecular weight of at least 50,000 Da, such as at least 100,000 Da, for example at least 200,000 Da, such as at least 300,000 Da, for example at least 400,000 Da, such as at least 500,000 Da, for example at least 600,000 Da, such as at least 700,000 Da, for example at least 800,000 Da, such as at least 900,000 Da, for example at least 1,000,000 Da, such as at least 1,100,000 Da, for example at least 1,200,000 Da, such as at least 1,300,000 Da, for example at least 1,400,000 Da, such as at least 1,500,000 Da, for example at least 1,600,000 Da, such as at least 1,700,000 Da, for example at least 1,800,000 Da, such as at least 1,900,000 Da, for example at least 2,000,000 Da, such as at least 2,100,000 Da, for example at least 2,200,000 Da, such as at least 2,300,000 Da, for example at least 2,400,000 Da, such as at least 2,500,000 Da, for example at least 2,600,000 Da, such as at least 2,700,000 Da, for example at least 2,800,000 Da, such as at least 2,900,000 Da, for example at least 3,000,000 Da, such as at least 3,100,000 Da, for example at least 3,200,000 Da, such as at least 3,300,000 Da, for example at least 3,400,000 Da, such as at least 3,500,000 Da, for example at least 3,600,000 Da, such as at least 3,700,000 Da, for example at least 3,800,000 Da, such as at least 3,900,000 Da, for example at least 4,000,000 Da, such as at least 4,100,000 Da, for example at least 4,200,000 Da, such as at least 4,300,000 Da, for example at least 4,400,000 Da, such as at least 4,500,000 Da, for example at least 4,600,000 Da, such as at least 4,700,000 Da, for example at least 4,800,000 Da, such as at least 4,900,000 Da, for example at least 5,000,000 Da.

21. The composition according to any of claims 1-20, wherein the one or more pharmamers has a molecular weight of less than 5,000,000 Da, such as less than 4,900,000 Da, for example less than 4,800,000 Da, such as less than 4,700,000 Da, for example less than 4,600,000 Da, such as less than 4,500,000 Da, for example less than 4,400,000 Da, such as less than 4,300,000 Da, for example less than 4,200,000 Da, such as less than 4,100,000 Da, for example less than 4,000,000 Da, such as less than 3,900,000 Da, for example less than 3,800,000 Da, such as less than 3,700,000 Da, for example less than 3,600,000 Da, such as less than 3,500,000 Da, for example less than 3,400,000 Da, such as less than 3,300,000 Da, for example less than 3,200,000 Da, such as less than 3,100,000 Da, for example less than 3,000,000 Da, such as less than 2,900,000 Da, for example less than 2,800,000 Da, such as less than 2,700,000 Da, for example less than 2,600,000 Da, such as less than 2,500,000 Da, for example less than 2,400,000 Da, such as less than 2,300,000 Da, for example less than 2,200,000 Da, such as less than 2,100,000 Da, for example less than 2,000,000 Da, such as less than 1,900,000 Da, for example less than 1,800,000 Da, such as less than 1,700,000 Da, for example less than 1,600,000 Da, such as less than 1,500,000 Da, for example less than 1,400,000 Da, such as less than 1,300,000 Da, for example less than 1,200,000 Da, such as less than 1,100,000 Da, for example less than 1,000,000 Da, such as less than 900,000 Da, for example less than 800,000 Da, such as less than 700,000 Da, for example less than 600,000 Da, such as less than 500,000 Da, for example less than 400,000 Da, such as less than 300,000 Da, for example less than 200,000 Da, such as less than 100,000 Da, for example less than 50,000 Da.

22. The composition according to any of claims 1-21, wherein the composition comprises more than 1 pharmamer, such as more than 2, 3, 4, 5, 6, 7, 8, 9, 10, 11, 12, 13, 14, 15, 16, 17, 18, 19, 20, 25, 30, 35, 40, 45, 50, 55, 60, 65, 70, 75, 80, 85, 90, 95, 100, 200, 300, 400, 500, 600, 700, 800, 900, 1,000, 2,000, 3,000, 4,000, 5,000, 6,000, 7,000, 8,000, 9,000, or more than 10,000 pharmamers.

23. The composition according to any of claims 1-22, wherein the composition comprises more than 2 different pharmamers, such as more than 3, 4, 5, 6, 7, 8, 9, 10, 11, 12, 13, 14, 15, 16, 17, 18, 19, 20, 25, 30, 35, 40, 45, 50, 55, 60, 65, 70, 75, 80, 85, 90, 95, 100, 200, 300, 400, 500, 600, 700, 800, 900, 1,000, 2,000, 3,000, 4,000, 5,000, 6,000, 7,000, 8,000, 9,000, or more than 10,000 different pharmamers.

24. The composition according to any of claims 1-23, wherein the composition comprises more than 2 identical pharmamers, such as more than 3, 4, 5, 6, 7, 8, 9, 10, 11, 12, 13, 14, 15, 16, 17, 18, 19, 20, 25, 30, 35, 40, 45, 50, 55, 60, 65, 70, 75, 80, 85, 90, 95, 100, 200, 300, 400, 500, 600, 700, 800, 900, 1,000, 2,000, 3,000, 4,000, 5,000, 6,000, 7,000, 8,000, 9,000, or more than 10,000 identical pharmamers.

25. The composition according to any of claims 1-24, wherein the composition comprises less than 10,000 pharmamers, such as for example less than 9,000, 8,000, 7,000, 6,000, 5,000, 4,000, 3,000, 2,000, 1,000, 900, 800, 700, 600, 500, 400, 300, 200, 100, 95, 90, 85, 80, 75, 70, 65, 60, 55, 50, 45, 40, 35, 30, 25, 20, 15, 10, 9, 8, 7, 6, 5, 4, 3, or less than 2 pharmamers.

26. The composition according to any of claims 1-25, wherein the composition comprises less than 10,000 different pharmamers, such as for example less than 9,000, 8,000, 7,000, 6,000, 5,000, 4,000, 3,000, 2,000, 1,000, 900, 800, 700, 600, 500, 400, 300, 200, 100, 95, 90, 85, 80, 75, 70, 65, 60, 55, 50, 45, 40, 35, 30, 25, 20, 15, 10, 9, 8, 7, 6, 5, 4, 3 or less than 2 different pharmamers.

27. The composition according to any of claims 1-26, wherein the composition comprises less than 10,000 identical pharmamers, such as for example less than 9,000, 8,000, 7,000, 6,000, 5,000, 4,000, 3,000, 2,000, 1,000, 900, 800, 700, 600, 500, 400, 300, 200, 100, 95, 90, 85, 80, 75, 70, 65, 60, 55, 50, 45, 40, 35, 30, 25, 20, 15, 10, 9, 8, 7, 6, 5, 4, 3, or less than 2 identical pharmamers.

28. The composition according to any of the claims 1-27, wherein the one or more pharmamers comprises one or more biologically active molecules.

29. The composition according to any of the claims 1-28, wherein the one or more pharmamers comprises more than 1 biologically active molecules such as more than 2, 3, 4, 5, 6, 7, 8, 9, 10, 11, 12, 13, 14, 15, 16, 17, 18, 19, 20, 25, 30, 35, 40, 45, 50, 55, 60, 65, 70, 75, 80, 85, 90, 95, 100, 200, 300, 400, 500, 600, 700, 800, 900, 1,000, 2,000, 3,000, 4,000, 5,000, 6,000, 7,000, 8,000, 9,000, or more than 10,000 biological active molecules.

30. The composition according to any of the claims 1-29, wherein the one or more pharmamers comprises more than 1 different biologically active molecules such as more than 2, 3, 4, 5, 6, 7, 8, 9, 10, 11, 12, 13, 14, 15, 16, 17, 18, 19, 20, 25, 30, 35, 40, 45, 50, 55, 60, 65, 70, 75, 80, 85, 90, 95, 100, 200, 300, 400, 500, 600, 700, 800, 900, 1,000, 2,000, 3,000, 4,000, 5,000, 6,000, 7,000, 8,000, 9,000, or more than 10,000 different biological active molecules.

31. The composition according to any of the claims 1-30, wherein the one or more pharmamers comprises more than 1 identical biologically active molecules such as more than 2, 3, 4, 5, 6, 7, 8, 9, 10, 11, 12, 13, 14, 15, 16, 17, 18, 19, 20, 25, 30, 35, 40, 45, 50, 55, 60, 65, 70, 75, 80, 85, 90, 95, 100, 200, 300, 400, 500, 600, 700, 800, 900, 1,000, 2,000, 3,000, 4,000, 5,000, 6,000, 7,000, 8,000, 9,000, or more than 10,000 identical biological active molecules.

32. The composition according to any of claims 1-31, wherein one or more pharmamers comprises less than 10,000 biologically active molecules, such as for example less than 9,000, 8,000, 7,000, 6,000, 5,000, 4,000, 3,000, 2,000, 1,000, 900, 800, 700, 600, 500, 400, 300, 200, 100, 95, 90, 85, 80, 75, 70, 65, 60, 55, 50, 45, 40, 35, 30, 25, 20, 15, 10, 9, 8, 7, 6, 5, 4, 3, or less than 2 biologically active molecules.

33. The composition according to any of claims 1-32, wherein the one or more pharmamers comprises less than 10,000 different biologically active molecules, such as for example less than 9,000, 8,000, 7,000, 6,000, 5,000, 4,000, 3,000, 2,000, 1,000, 900, 800, 700, 600, 500, 400, 300, 200, 100, 95, 90, 85, 80, 75, 70, 65, 60, 55, 50, 45, 40, 35, 30, 25, 20, 15, 10, 9, 8, 7, 6, 5, 4, 3 or less than 2 different biologically active molecules.

34. The composition according to any of claims 1-33, wherein the one or more pharmamers comprises less than 10,000 identical biologically active molecules, such as for example less than 9,000, 8,000, 7,000, 6,000, 5,000, 4,000, 3,000, 2,000, 1,000, 900, 800, 700, 600, 500, 400, 300, 200, 100, 95, 90, 85, 80, 75, 70, 65, 60, 55, 50, 45, 40, 35, 30, 25, 20, 15, 10, 9, 8, 7, 6, 5, 4, 3, or less than 2 identical biologically active molecules.

35. The composition according to any of the claims 1-31, wherein the composition comprises one or more biologically active molecules.

36. The composition according to any of the claims 1-28, wherein the composition comprises more than 1 biologically active molecules such as more than 2, 3, 4, 5, 6, 7, 8, 9, 10, 11, 12, 13, 14, 15, 16, 17, 18, 19, 20, 25, 30, 35, 40, 45, 50, 55, 60, 65, 70, 75, 80, 85, 90, 95, 100, 200, 300, 400, 500, 600, 700, 800, 900, 1,000, 2,000, 3,000, 4,000, 5,000, 6,000, 7,000, 8,000, 9,000, or more than 10,000 biological active molecules.

37. The composition according to any of the claims 1-29, wherein the composition comprises more than 1 different biologically active molecules such as more than 2, 3, 4, 5, 6, 7, 8, 9, 10, 11, 12, 13, 14, 15, 16, 17, 18, 19, 20, 25, 30, 35, 40, 45, 50, 55, 60, 65, 70, 75, 80, 85, 90, 95, 100, 200, 300, 400, 500, 600, 700, 800, 900, 1,000, 2,000, 3,000, 4,000, 5,000, 6,000, 7,000, 8,000, 9,000, or more than 10,000 different biological active molecules.

38. The composition according to any of the claims 1-30, wherein the composition comprises more than 1 identical biologically active molecules such as more than 2, 3, 4, 5, 6, 7, 8, 9, 10, 11, 12, 13, 14, 15, 16, 17, 18, 19, 20, 25, 30, 35, 40, 45, 50, 55, 60, 65, 70, 75, 80, 85, 90, 95, 100, 200, 300, 400, 500, 600, 700, 800, 900, 1,000, 2,000, 3,000, 4,000, 5,000, 6,000, 7,000, 8,000, 9,000, or more than 10,000 identical biological active molecules.

39. The composition according to any of claims 1-31, wherein the composition comprises less than 10,000 biologically active molecules, such as for example less than 9,000, 8,000, 7,000, 6,000, 5,000, 4,000, 3,000, 2,000, 1,000, 900, 800, 700, 600, 500, 400, 300, 200, 100, 95, 90, 85, 80, 75, 70, 65, 60, 55, 50, 45, 40, 35, 30, 25, 20, 15, 10, 9, 8, 7, 6, 5, 4, 3, or less than 2 biologically active molecules.

40. The composition according to any of claims 1-32, wherein the composition comprises less than 10,000 different biologically active molecules, such as for example less than 9,000, 8,000, 7,000, 6,000, 5,000, 4,000, 3,000, 2,000, 1,000, 900, 800, 700, 600, 500, 400, 300, 200, 100, 95, 90, 85, 80, 75, 70, 65, 60, 55, 50, 45, 40, 35, 30, 25, 20, 15, 10, 9, 8, 7, 6, 5, 4, 3 or less than 2 different biologically active molecules.

41. The composition according to any of claims 1-33, wherein the composition comprises less than 10,000 identical biologically active molecules, such as for example less than 9,000, 8,000, 7,000, 6,000, 5,000, 4,000, 3,000, 2,000, 1,000, 900, 800, 700, 600, 500, 400, 300, 200, 100, 95, 90, 85, 80, 75, 70, 65, 60, 55, 50, 45, 40, 35, 30, 25, 20, 15, 10, 9, 8, 7, 6, 5, 4, 3, or less than 2 biologically active molecules.

42. The composition according to any of claims 35-41, wherein the one or more biologically active molecules are not attached to the one or more pharmamers.

43. The composition according to any of claims 35-42, wherein the one or more biologically active molecules are attached to some but not all of the one or more pharmamers.

44. The composition according to any of claims 35-43, wherein the one or more biologically active molecules are attached to one of the one or more pharmamers.

45. The composition according to any of claims 35-44, wherein the one or more biologically active molecules are attached to more than one of the one or more pharmamers such as more to than 2, 3, 4, 5, 6, 7, 8, 9, 10, 11, 12, 13, 14, 15, 16, 17, 18, 19, 20, 25, 30, 35, 40, 45, 50, 55, 60, 65, 70, 75, 80, 85, 90, 95, 100, 200, 300, 400, 500, 600, 700, 800, 900, 1,000, 2,000, 3,000, 4,000, 5,000, 6,000, 7,000, 8,000, 9,000, or to more than 10,000 of the one or more pharmamers.

46. The composition according to any of claims 35-44, wherein the one or more biologically active molecules are attached to less than 10,000 of the one or more pharmamers, such as for example to less than 9,000, 8,000, 7,000, 6,000, 5,000, 4,000, 3,000, 2,000, 1,000, 900, 800, 700, 600, 500, 400, 300, 200, 100, 95, 90, 85, 80, 75, 70, 65, 60, 55, 50, 45, 40, 35, 30, 25, 20, 15, 10, 9, 8, 7, 6, 5, 4, 3 or to less than 2 of the one or more pharmamers.

47. The composition according to any of claims 1-46, wherein the composition comprises at least one biologically active molecule such as from 1 to 3, 1 to 4, 1 to 5, 1 to 6, 1 to 7, 1 to 8, 1 to 9, 1 to 10, or 1 to more than 10; 2 to 3, 2 to 4, 2 to 5, 2 to 6, 2 to 7, 2 to 8, 2 to 9, 2 to 10, or 2 to more than 10; 3 to 4, 3 to 5, 3 to 6, 3 to 7, 3 to 8, 3 to 9, 3 to 10, or 3 to more than 10; 4 to 5, 4 to 6, 4 to 7, 4 to 8, 4 to 9, 4 to 10, or 4 to more than 10; 5 to 6, 5 to 7, 5 to 8, 5 to 9, 5 to 10, or 5 to more than 10; 6 to 7, 6 to 8, 6 to 9, 6 to 10, or 6 to more than 10; 7 to 8, 7 to 9, 7 to 10, or 7 to more than 10; 8 to 9, 8 to 10, or 8 to more than 10; 9 to 10, or 9 to more than 10 different biologically active molecules.

48. The composition according to any of claims 1-47, wherein the composition comprises two different biologically active molecules termed A and B, wherein the ratio of A:B can be selected from the group consisting of 1:1, 1:2, 1:3, 1:4, 1:5, 1:10, 2:3, and 3:5.

49. The composition according to any of claims 1-48, wherein the composition comprises three different biologically active molecules termed A, B and C, wherein the ratio of A:B:C can be selected from the group consisting of 1:1:1, 1:2:1, 1:3:1, 1:4:1, 1:5:1, 1:10:1, 2:1:1, 2:1:2, 2:3:2, and 3:5:8.

50. The composition according to any of claims 1-49, wherein the composition comprises five different biologically active molecules termed A, B, C, D, and E, wherein the ratio of A:B:C:D:E can be selected from the group consisting of 1:1:1:1:1, 1:1:1:1:2, 1:1:1:2:2, 1:2:2:2:2, 2:4:3:6:5, 4:6:8:1:1, and 10:1:2:5:2.

51. The composition according to any of the claims 28-50, wherein the one or more biologically active molecules comprises one or more molecules with adjuvant effects.

52. The composition according to any of the claims 28-51, wherein the one or more biologically active molecules comprises one or more immune targets such as one or more antigens.

53. The composition according to any of the claims 28-52, wherein the one or more biologically active molecules comprises one or more molecules with biological activity such as one or more enzymes.

54. The composition according to any of the claims 28-53, wherein the one or more biologically active molecules comprises one or more regulators of one or more receptor activities.

55. The composition according to any of the claims 28-54, wherein the one or more biologically active molecules comprises one or more receptor ligands.

56. The composition according to any of the claims 28-55, wherein the one or more biologically active molecules comprises one or more immune potentiators.

57. The composition according to any of the claims 28-56, wherein the one or more biologically active molecules comprises one or more drugs.

58. The composition according to any of the claims 28-57, wherein the one or more biologically active molecules comprises one or more toxins.

59. The composition according to any of the claims 28-58, wherein the one or more biologically active molecules comprises one or more co-receptors.

60. The composition according to any of the claims 28-59, wherein the one or more biologically active molecules comprises one or more proteins.

61. The composition according to any of the claims 28-60, wherein the one or more biologically active molecules comprises one or more peptides.

62. The composition according to any of the claims 28-61, wherein the one or more biologically active molecules comprises one or more sugar moieties.

63. The composition according to any of the claims 28-62, wherein the one or more biologically active molecules comprises one or more lipid groups.

64. The composition according to any of the claims 28-63, wherein the one or more biologically active molecules comprises one or more nucleic acids including siRNA and microRNA.

65. The composition according to any of the claims 28-64, wherein the one or more biologically active molecules comprises one or more nano particles.

66. The composition according to any of the claims 28-65, wherein the one or more biologically active molecules comprises one or more small molecules.

67. The composition according to any of the claims 28-66, wherein the one or more biologically active molecules comprises one or more membranes.

68. The composition according to any of the claims 28-67, wherein the one or more biologically active molecules comprises one or more liposomes.

69. The composition according to any of the claims 28-68, wherein the one or more biologically active molecules comprises one or more immunological active molecules.

70. The composition according to any of the claims 28-69, wherein the one or more biologically active molecules comprises more than one identical immunological active molecules.

71. The composition according to any of the claims 28-70, wherein the one or more biologically active molecules comprises more than one different immunological active molecules.

72. The composition according to claim 69, wherein the one or more immunological active molecules comprises one or more biological active molecules including proteins, co-stimulatory molecules, cell modulating molecules, receptors, accessory molecules, adhesion molecules, natural ligands, and toxic molecules, as well as antibodies and recombinant binding molecules to any of the foregoing, and combinations thereof.

73. The composition according to claim 69, wherein the one or more immunological active molecules comprises one or more molecule(s) selected from the group consisting of MHC Class 1 proteins like HLA-A, HLA-B, HLA-C alone or in complex with HLA-b2Microglobulin with or without peptide in the binding groove.

74. The composition according to claim 69, wherein the one or more immunological active molecules comprises one or more molecule(s) selected from the group consisting of Class 1-like proteins like MICA, MICB, CD1d, HLA-E, HLA-F, HLA-G, HLA-H, ULBP-1, ULBP-2, and ULBP-3.

75. The composition according to claim 69, wherein the one or more immunological active molecules comprises one or more molecule(s) selected from the group consisting of HLA class 2 proteins like HLA-DR (HLA-DRA, HLA-DRB1, HLA-DRB3, HLA-DRB4, HLA-DRB5), HLA-DQ (HLA-DQA1, HLADQA2, HLA-DQB1, HLA-DQB2), HLA-DP (HLA-DPA1, HLA-DPB1), HLA-DO (HLA-DOA, HLA-DOB), HLA-DM (HLA-DMA, HLA-DMB) alone or in complexes consisting of class 2 A- and B-chains with or without peptide in the binding groove.

76. The composition according to claim 69, wherein the one or more immunological active molecules comprises one or more molecule(s) selected from the group consisting of Cytokines; IFN-alpha, IFN-beta, IFN-gamma, IL-1, IL-2, IL-3, IL-4, IL-6, IL-7, IL-8, IL-10, IL-11, IL-12, IL-15, IL-16, IL-17, IL-18, IL-19, IL-20, IL-21, IL-22, IL-23, IL-24, IL-25, IL-26, IL-27, IL-28, -IL-29, IL-30, IL-31, IL-32, IL-33, IL-34, IL-35, CSFs (colony-stimulating factors), c-Kit, EPO, TNF-alfa, TNF-beta, Lymphotoxin; Cytokine receptors like IL-1R, IL-2R, IL-3R, IL-4R, IL-5R, IL-6R, IL-7R, IL-8R, IL-9-R, IL-10R, IL-11R, IL-12R, IL-13R, IL-15R, IL-18R, IL-20R, IL-21R, IL-22R, IL-23R, IL-27R, IL-28R; Chemokines such as CXCL1, CXCL2, CXCL3, CXCL4, CXCL5, CXCL6, CXCL7, CXCL8, CXCL9, CXCL10, CXCL11, CXCL12, CXCL13, CXCL14, CXCL15, CXCL16, CCL1, CCL2, CCL3, CCL4, CCL5, CCL6, CCL7, CCL8, CCL8, CCL9, CCL10, CCL11, CCL12, CCL13, CCL14, CCL15, CCL16, CCL17, CCL18, CCL19, CCL20, CCL21, CCL22, CCL23, CCL24, CCL25, CCL26, CCL27, CCL28, CXCR4, CCRL2; Chemokine receptors like CCR1, CCR2, CCR3, CCR4, CCR5, CCR6, CCR7, CCR8, CCR9, CCR10, CCR11, CXCR1, CXCR2, CXCR3, CXCR4, CXCR5, CXCR6, CXCR7, and CX3CR1.

77. The composition according to claim 69, wherein the one or more immunological active molecules comprises one or more molecule(s) selected from the group consisting of Toll-like receptors such as TLR1, TLR2, TLR3, TLR4, TLR5, TLR6, TLR7, TLR8, TLR9, and TLR10.

78. The composition according to claim 69, wherein the one or more immunological active molecules comprises one or more molecule(s) selected from the group consisting of Toll like receptor ligands such as multiple triacyl lipopeptides, multiple diacyl lipopeptides, multiple glycolipids, multiple lipopeptides, multiple lipoproteins, lipoteichoic acid, peptidoglycans, heat shock proteins (HSP70, HSP90 and others), zymosan, single- and double-stranded RNA, Poly I:C, lipo-polysaccharides, fibrinogen, heparin sulphate fragments, hyaluronic acid fragments, flagellin, imidazoquinoline, loxoribine (guanosine analogue), bropirimine, Imiquimod, unmethylated CpG DNA.

79. The composition according to claim 69, wherein the one or more immunological active molecules comprises one or more molecule(s) selected from the group consisting of Viral entry receptors/molecules such as Ku70, Pvr, Prr1, HVEM, EphrinB2, cellular integrins (in particular alpha2beta1, alpha6beta1 alphaVbeta3), CD81, CD155, SR-B1, claudin-1, xCT, human nectin-2, LIGHT, TLR3, LIR, Heparan sulphate proteoglycans, GPI anchored proteins, hemeagglutinin receptor.

80. The composition according to claim 69, wherein the one or more immunological active molecules comprises one or more molecule(s) selected from the group consisting of Bacterial entry receptors/molecules like CD48, CEACAM-1, -2, -3, -4, -5, -6, invasion, internalin (InIA), InIB; Fc receptors like ε (FcεRI, FcεRII)—γ (FcγRI, FcγRII, FcγRIII)—α/μ (FcαRI, Fcα/μR)—Neonatal FcR.

81. The composition according to claim 69, wherein the one or more immunological active molecules comprises one or more molecule(s) selected from the group consisting of Lymphocyte homing receptors such as CD44, L-selectin, VLA-4 (CD49a, b, c, d, e, f), LFA-1.

82. The composition according to claim 69, wherein the one or more immunological active molecules comprises one or more molecule(s) selected from the group consisting of Co-stimulatory molecules such as CD2, CD3, CD4, CD5, CD8, CD9, CD27, CD28, CD30, CD69, CD134 (OX40), CD120, CD137 (4-1BB), CD147, CDw150 (SLAM), CD152 (CTLA-4), CD153 (CD30L), CD40L (CD154), NKG2D, ICOS, PD-1, Fas (CD95), FasL, CD40, CD58, CD70, CD72, B7.1 (CD80), B7.2 (CD86), B7RP-1, B7-H3, PD-L1, PD-L2, CD134L, CD137L, ICOSL.

83. The composition according to claim 69, wherein the one or more immunological active molecules comprises one or more molecule(s) selected from the group consisting of NK cell receptors/molecules such as CD16, NKp30, NKp44, NKp46, NKp80, 2B4, KIR3DL1, KIR3DL″, KIR3DS1, KIR2DL1, KIRDL2, KIR2DL3, KIR2DL4, KIR2DL5, CD94/NKG2A, CD94/NKG2C, CD94/NKG2E, CD94/NKG2H, NKG2ADNKG2D.

84. The composition according to claim 69, wherein the one or more immunological active molecules comprises one or more molecule(s) selected from the group consisting of Adhesion molecules such as ICAM-1, ICAM-2, GlyCAM-1, VCAM, CD34.

85. The composition according to claim 69, wherein the one or more immunological active molecules comprises one or more molecule(s) selected from the group consisting of Anti microbial peptides such Defensins and cathelicidin derived peptide LL-37.

86. The composition according to claim 69, wherein the one or more immunological active molecules comprises one or more molecule(s) selected from the group consisting of anti-LFA-1, anti-CD44, anti-beta7, anti-selectin L, anti-selectin E, and anti-selectin P, toxic molecules selected from toxins, enzymes, antibodies, radioisotopes, chemiluminescent substances, bioluminescent substances, polymers, metal particles, and haptens, such as cyclophosphamide, methotrexate, Azathioprine, mizoribine, 15-deoxyspergualin, neomycin, staurosporine, genestein, herbimycin A, Pseudomonas exotoxin A, saporin, Rituxan, Ricin, gemtuzumab ozogamicin, Shiga toxin, vitamin D3, IL-2 toxins, cyclosporin, FK-506, rapamycin, TGF-beta, clotrimazole, nitrendipine, and charybdotoxin, heavy metals like inorganic and organic mercurials, and FN18-CRM9, radioisotopes such as incorporated isotopes of iodide, cobalt, selenium, tritium, and phosphor, and haptens such as DNP, and digoxiginin, and combinations of any of the foregoing, as well as antibodies (monoclonal, polyclonal, and recombinant) to the foregoing, where relevant.

87. The composition according to claim 69, wherein the one or more immunological active molecules comprises one or more molecule(s) selected from the group consisting of antibody derivatives or fragments thereof.

88. The composition according to claim 69, wherein the one or more immunological active molecules comprises one or more molecule(s) selected from the group consisting of biologically active molecules derived from viral or bacterial proteins or fragments thereof.

89. The composition according to any of claims 28-88, wherein the one or more biologically active molecules affect the characteristics of the one or more pharmamers e.g. with respect to binding properties, effects, antigenicity, specificity, solubility, stability, or detectability.

90. The composition according to any of claims 28-89, wherein the one or more biologically active molecules further comprises a flexible or rigid, and water soluble, linker that allows for the immobilized biologically active molecules to interact efficiently with surrounding cells and molecules.

91. The composition according to any of claims 28-90, wherein the one or more biologically active molecules further comprises a cleavable linker allowing for release of the biologically active molecules from the one or more pharmamers.

92. The composition according to any of claims 28-91, wherein the one or more biologically active molecules comprises one or more MHC multimers.

93. The composition according to claim 92, wherein the one or more MHC multimers comprises a MHC multimer comprising (a-b-P)ₙ,
wherein n>1,
wherein a and b together form a functional MHC protein capable of binding the peptide P, when P is present
wherein (a-b-P) is the MHC-peptide complex formed when the peptide P binds to the functional MHC protein,
wherein each MHC peptide complex is associated with one or more multimerization domains.

94. The composition according to claim 93, wherein the association is a covalent linkage so that one or more of the n MHC-peptide complexes is covalently linked to the one or more multimerization domains.

95. The composition according to claim 93, wherein the association is a non-covalent association so that one or more of the n MHC-peptide complexes is non-covalently associated with the one or more multimerization domains.

96. The composition according to any of claims 93-95, wherein the one or more multimerization domains comprises one or more scaffolds.

97. The composition according to any of claims 93-96, wherein the one or more multimerization domains comprises one or more carriers.

98. The composition according to any of claims 93-97, wherein the one or more multimerization domains comprises at least one scaffold and at least one carrier.

99. The composition according to any of the claims 93-98, wherein the one or more multimerization domains comprise one or more optionally substituted organic molecules.

100. The composition according to claim 99, wherein the optionally substituted organic molecule comprises one or more functionalized cyclic structures.

101. The composition according to claim 100, wherein the one or more functionalized cyclic structures comprises one or more benzene rings.

102. The composition according to claim 99, wherein the optionally substituted organic molecule comprises a scaffold molecule comprising at least three reactive groups, or at least three sites suitable for non-covalent attachment.

103. The composition according to any of the claims 93-102, wherein the one or more multimerization domains comprises one or more biological cells, such as antigen presenting cells or dendritic cells or cells transfected with one or more genes encoding MHC molecules.

104. The composition according to any of the claims 93-103, wherein the one or more multimerization domains comprises one or more membranes.

105. The composition according to claim 104, wherein the one or more membranes comprises liposomes or micelles.

106. The composition according to claim 93-105, wherein the one or more multimerization domains comprises one or more polymers.

107. The composition according to claim 106, wherein the one or more polymers are selected from the group consisting of polysaccharides.

108. The composition according to claim 107, wherein the polysaccharide comprises one or more dextran moieties.

109. The composition according to any of claims 93-108, wherein the one or more multimerization domains comprises one or more entities selected from the group consisting of an IgG domain, a coiled-coil polypeptide structure, a DNA duplex, a nucleic acid duplex, PNA-PNA, PNA-DNA, DNA-RNA, streptavidin and avidin.

110. The composition according to any of claims 93-109, wherein the one or more multimerization domains comprises an avidin, such as streptavidin.

111. The composition according to any of claims 93-109, wherein the one or more multimerization domains comprises an antibody.

112. The composition according to claim 111, wherein the antibody is selected from the group consisting of polyclonal antibody, monoclonal antibody, IgA, IgG, IgM, IgD, IgE, IgG1, IgG2, IgG3, IgG4, IgA1, IgA2, IgM1, IgM2, humanized antibody, humanized monoclonal antibody, chimeric antibody, mouse antibody, rat antibody, rabbit antibody, human antibody, camel antibody, sheep antibody, engineered human antibody, epitope-focused antibody, agonist antibody, antagonist antibody, neutralizing antibody, naturally-occurring antibody, isolated antibody, monovalent antibody, bispecific antibody, trispecific antibody, multispecific antibody, heteroconjugate antibody, immunoconjugates, immunoliposomes, labeled antibody, antibody fragment, domain antibody, nanobody, minibody, maxibody, diabody, fusion antibody.

113. The composition according to any of claims 93-112, wherein the MHC multimer comprises one or more small organic scaffold molecules.

114. The composition according to any of claims 93-113, wherein the MHC multimer comprises one or more further polypeptides in addition to a and b.

115. The composition according to any of claims 93-114, wherein the MHC multimer comprises one or more protein complexes.

116. The composition according to any of claims 93-115, wherein the MHC multimer comprises one or more beads.

117. The composition according to any of claims 93-116, wherein the multimerization domain comprises one or more compounds selected from the group consisting of agarose, sepharose, resin beads, glass beads, pore-glass beads, glass particles coated with a hydrophobic polymer, chitosan-coated beads, SH beads, latex beads, spherical latex beads, allele-type beads, SPA bead, PEG-based resins, PEG-coated bead, PEG-encapsulated bead, polystyrene beads, magnetic polystyrene beads, glutathione agarose beads, magnetic bead, paramagnetic beads, protein A and/or protein G sepharose beads, activated carboxylic acid bead, macroscopic beads, microscopic beads, insoluble resin beads, silica-based resins, cellulosic resins, cross-linked agarose beads, polystyrene beads, cross-linked polyacrylamide resins, beads with iron cores, metal beads, dynabeads, Polymethylmethacrylate beads activated with NHS, streptavidin-agarose beads, polypropylene, polyethylene, dextran, nylon, amylases, natural and modified celluloses, nitrocellulose, polyacrylamides, gabbros, magnetite, polymers, oligomers, non-repeating moieties, polyethylene glycol (PEG), monomethoxy-PEG, mono-(C₁-C₁₀)alkoxy-PEG, aryloxy-PEG, poly-(N-vinyl pyrrolidone)PEG, tresyl monomethoxy PEG, PEG propionaldehyde, bis-succinimidyl carbonate PEG, polystyrene bead crosslinked with divinylbenzene, propylene glycol homopolymers, a polypropylene oxide/ethylene oxide co-polymer, polyoxyethylated polyols (e.g., glycerol), polyvinyl alcohol, dextran, aminodextran, carbohydrate-based polymers, cross-linked dextran beads, polysaccharide beads, polycarbamate beads, divinyl sulfone activated polysaccharide, polystyrene beads that have been functionalized with tosyl-activated esters, magnetic polystyrene beads functionalized with tosyl-activated esters, streptavidin beads, streptavidin-monomer coated beads, streptavidin-tetramer coated beads, Streptavidin Coated Compel Magnetic beads, avidin coated beads, dextramer coated beads, divinyl sulfone-activated dextran, Carboxylate-modified bead, amine-modified beads, antibody coated beads, cellulose beads, grafted co-poly beads, poly-acrylamide beads, dimethylacrylamide beads optionally crosslinked with N—N′-bis-acryloylethylenediamine, hollow fiber membranes, fluorescent beads, collagen-agarose beads, gelatin beads, collagen-gelatin beads, collagen-fibronectin-gelatin beads, collagen beads, chitosan beads, collagen-chitosan beads, protein-based beads, hydrogel beads, hemicellulose, alkyl cellulose, hydroxyalkyl cellulose, carboxymethylcellulose, sulfoethylcellulose, starch, xylan, amylopectine, chondroitin, hyarulonate, heparin, guar, xanthan, mannan, galactomannan, chitin and chitosan.

118. The composition according to any of claims 93-117, wherein the one or more multimerization domains comprises a dimerization domain.

119. The composition according to any of claims 93-118, wherein the one or more multimerization domains comprises a trimerization domain.

120. The composition according to any of claims 93-119, wherein the one or more multimerization domains comprises a tetramerization domain.

121. The composition according to any of claims 93-120, wherein the one or more multimerization domains comprises a pentamerization domain.

122. The composition according to claim 121, wherein the pentamerization domain comprises a coiled-coil polypeptide structure.

123. The composition according to any of claims 93-122, wherein the one or more multimerization domains comprises a hexamerization domain.

124. The composition according to claim 123, wherein the hexamerization domain comprises three IgG domains.

125. The composition according to any of claim 93-124, wherein the one or more multimerization domains comprises a polymer structure to which is attached one or more scaffolds.

126. The composition according to claim 125, wherein the polymer structure comprises a polysaccharide.

127. The composition according to claim 126, wherein the polysaccharide comprises one or more dextran moieties.

128. The composition according to any of claims 93-127, wherein the one or more multimerization domains comprises a polyamide and/or a polyethylene glycol and/or a polysaccharide and/or a sepharose.

129. The composition according to any of claims 93-128, wherein the one or more multimerization domains comprises a carboxy methyl dextran and/or a dextran polyaldehyde and/or a carboxymethyl dextran lactone and/or a cyclodextrin.

130. The composition according to any claims 93-129, wherein the one or more multimerization domains have a molecular weight of less than 1,000 Da.

131. The composition according to any of claims 93-130, wherein the one or more multimerization domains have a molecular weight of from 1,000 Da to preferably less than 10,000 Da.

132. The composition according to any of claims 93-131, wherein the one or more multimerization domains have a molecular weight of from 10,000 Da to preferably less than 100,000 Da.

133. The composition according to any of claims 93-132, wherein the one or more multimerization domains have a molecular weight of from 100,000 Da to preferably less than 1,000,000 Da.

134. The composition according to any of claims 93-133, wherein the one or more multimerization domains have a molecular weight of more than 1,000,000 Da.

135. The composition according to any of claims 93-134, wherein the one or more multimerization domains have a molecular weight of from 50,000 Da to preferably less than 1,000,000 Da, such as from 50,000 Da to 980,000; for example from 50,000 Da to 960,000; such as from 50,000 Da to 940,000; for example from 50,000 Da to 920,000; such as from 50,000 Da to 900,000; for example from 50,000 Da to 880,000; such as from 50,000 Da to 860,000; for example from 50,000 Da to 840,000; such as from 50,000 Da to 820,000; for example from 50,000 Da to 800,000; such as from 50,000 Da to 780,000; for example from 50,000 Da to 760,000; such as from 50,000 Da to 740,000; for example from 50,000 Da to 720,000; such as from 50,000 Da to 700,000; for example from 50,000 Da to 680,000; such as from 50,000 Da to 660,000; for example from 50,000 Da to 640,000; such as from 50,000 Da to 620,000; for example from 50,000 Da to 600,000; such as from 50,000 Da to 580,000; for example from 50,000 Da to 560,000; such as from 50,000 Da to 540,000; for example from 50,000 Da to 520,000; such as from 50,000 Da to 500,000; for example from 50,000 Da to 480,000; such as from 50,000 Da to 460,000; for example from 50,000 Da to 440,000; such as from 50,000 Da to 420,000; for example from 50,000 Da to 400,000; such as from 50,000 Da to 380,000; for example from 50,000 Da to 360,000; such as from 50,000 Da to 340,000; for example from 50,000 Da to 320,000; such as from 50,000 Da to 300,000; for example from 50,000 Da to 280,000; such as from 50,000 Da to 260,000; for example from 50,000 Da to 240,000; such as from 50,000 Da to 220,000; for example from 50,000 Da to 200,000; such as from 50,000 Da to 180,000; for example from 50,000 Da to 160,000; such as from 50,000 Da to 140,000; for example from 50,000 Da to 120,000; such as from 50,000 Da to 100,000; for example from 50,000 Da to 80,000; such as from 50,000 Da to 60,000; for example from 100,000 Da to 1,000,000; such as from 100,000 Da to 980,000; for example from 100,000 Da to 960,000; such as from 100,000 Da to 940,000; for example from 100,000 Da to 920,000; such as from 100,000 Da to 900,000; for example from 100,000 Da to 880,000; such as from 100,000 Da to 860,000; for example from 100,000 Da to 840,000; such as from 100,000 Da to 820,000; for example from 100,000 Da to 800,000; such as from 100,000 Da to 780,000; for example from 100,000 Da to 760,000; such as from 100,000 Da to 740,000; for example from 100,000 Da to 720,000; such as from 100,000 Da to 700,000; for example from 100,000 Da to 680,000; such as from 100,000 Da to 660,000; for example from 100,000 Da to 640,000; such as from 100,000 Da to 620,000; for example from 100,000 Da to 600,000; such as from 100,000 Da to 580,000; for example from 100,000 Da to 560,000; such as from 100,000 Da to 540,000; for example from 100,000 Da to 520,000; such as from 100,000 Da to 500,000; for example from 100,000 Da to 480,000; such as from 100,000 Da to 460,000; for example from 100,000 Da to 440,000; such as from 100,000 Da to 420,000; for example from 100,000 Da to 400,000; such as from 100,000 Da to 380,000; for example from 100,000 Da to 360,000; such as from 100,000 Da to 340,000; for example from 100,000 Da to 320,000; such as from 100,000 Da to 300,000; for example from 100,000 Da to 280,000; such as from 100,000 Da to 260,000; for example from 100,000 Da to 240,000; such as from 100,000 Da to 220,000; for example from 100,000 Da to 200,000; such as from 100,000 Da to 180,000; for example from 100,000 Da to 160,000; such as from 100,000 Da to 140,000; for example from 100,000 Da to 120,000; such as from 150,000 Da to 1,000,000; for example from 150,000 Da to 960,000; such as from 150,000 Da to 940,000; for example from 150,000 Da to 920,000; such as from 150,000 Da to 900,000; for example from 150,000 Da to 880,000; such as from 150,000 Da to 860,000; for example from 150,000 Da to 840,000; such as from 150,000 Da to 820,000; for example from 150,000 Da to 800,000; such as from 150,000 Da to 780,000; for example from 150,000 Da to 760,000; such as from 150,000 Da to 740,000; for example from 150,000 Da to 720,000; such as from 150,000 Da to 700,000; for example from 150,000 Da to 680,000; such as from 150,000 Da to 660,000; for example from 150,000 Da to 640,000; such as from 150,000 Da to 620,000; for example from 150,000 Da to 600,000; such as from 150,000 Da to 580,000; for example from 150,000 Da to 560,000; such as from 150,000 Da to 540,000; for example from 150,000 Da to 520,000; such as from 150,000 Da to 500,000; for example from 150,000 Da to 480,000; such as from 150,000 Da to 460,000; for example from 150,000 Da to 440,000; such as from 150,000 Da to 420,000; for example from 150,000 Da to 400,000; such as from 150,000 Da to 380,000; for example from 150,000 Da to 360,000; such as from 150,000 Da to 340,000; for example from 150,000 Da to 320,000; such as from 150,000 Da to 300,000; for example from 150,000 Da to 280,000; such as from 150,000 Da to 260,000; for example from 150,000 Da to 240,000; such as from 150,000 Da to 220,000; for example from 150,000 Da to 200,000; such as from 150,000 Da to 180,000; for example from 150,000 Da to 160,000.

136. The composition according to any of claims 93-135, wherein n is 2.

137. The composition according to any of claims 93-136, wherein n is 3.

138. The composition according to any of claims 93-137, wherein n is 4.

139. The composition according to any of claims 93-138, wherein n is 5.

140. The composition according to any of claims 93-139, wherein n is 6.

141. The composition according to any of claims 93-140, wherein n is 7.

142. The composition according to any of claims 93-141, wherein n is 8, 9, 10, 11 or 12.

143. The composition according to any of claims 93-142, wherein n<12.

144. The composition according to any of claims 93-143, wherein 1<n<100.

145. The composition according to any of claims 93-144, wherein 1<n<1000.

146. The composition according to any of claims 93-145, wherein 1<n.

147. The composition according to any of claims 93-146, wherein n is billions or trillions or higher.

148. The composition according to any of claims 93-147, wherein n<1,000,000,000.

149. The composition according to any of claims 93-148, wherein n<1,000,000,000,000,000,000.

150. The composition according to any of claims 93-149, wherein n (the total number of MHC molecules of the construct) is in the range from 100 MHC molecules to 1,000,000 MHC molecules such as from 100 to 1,000 MHC molecules, for example from 1,000 to 5,000 MHC molecules, such as from 5,000 to 10,000 MHC molecules, for example from 10,000 to 20,000 MHC molecules, such as from 20,000 to 30,000 MHC molecules, for example from 30,000 to 40,000 MHC molecules, such as from 40,000 to 50,000 MHC molecules, for example from 50,000 to 60,000 MHC molecules, such as from 60,000 to 70,000 MHC molecules, for example from 70,000 to 80,000 MHC molecules, such as from 80,000 to 90,000 MHC molecules, for example from 90,000 to 100,000 MHC molecules, such as from 100,000 to 200,000 MHC molecules, for example from 200,000 to 300,000 MHC molecules, such as from 300,000 to 400,000 MHC molecules, for example from 400,000 to 500,000 MHC molecules, such as from 500,000 to 600,000 MHC molecules, for example from 600,000 to 700,000 MHC molecules, such as from 700,000 to 800,000 MHC molecules, for example from 800,000 to 900,000 MHC molecules, such as from 900,000 to 1,000,000 MHC molecules.

151. The vaccine composition according to any of claims 93 to 150, wherein n is selected from the group of integers consisting of 1, 2, 3, 4, 5, 6, 7, 8, 9, 10, 11, 12, 13, 14, 15, 16, 17, 18, 19, 20, 21, 22, 23, 24, 25, 26, 27, 28, 29, 30, 31, 32, 33, 34, 35, 36, 37, 38, 39, 40, 41, 42, 43, 44, 45, 46, 47, 48, 50, 55, 60, 65, 70, 75, 80, 85, 90, 95, 100, 110, 120, 130, 140, 150, 160, 170, 180, 190, 200, 250, 300, 350, 400, 450, 500, 550, 600, 650, 700, 750, 800, 850, 900 and 1000.

152. The vaccine composition according to any of claims 93 to 151, wherein n has a value of from 1 to 1000, for example from 1 to 10, such as from 10 to 20, for example from 20 to 30, such as from 30 to 40, for example from 40 to 50, such as from 50 to 60, for example from 60 to 70, such as from 70 to 80, for example from 80 to 90, such as from 90 to 100, for example from 100 to 120, such as from 120 to 140, for example from 140 to 160, such as from 160 to 180, for example from 180 to 200, such as from 200 to 250, for example from 250 to 300, such as from 300 to 350, for example from 350 to 400, such as from 400 to 450, for example from 450 to 500, such as from 500 to 550, for example from 550 to 600, such as from 600 to 650, for example from 650 to 700, such as from 700 to 750, for example from 750 to 800, such as from 800 to 900, for example from 900 to 950, such as from 950 to 1000.

153. The composition according to any of claims 93-152, wherein a and/or b and/or P is of human origin.

154. The composition according to any of claims 93-153, wherein a and/or b and/or P is of mouse origin.

155. The composition according to any of claims 93-154, wherein a and/or b and/or P is of primate origin.

156. The composition according to any of claims 93-155, wherein a and/or b and/or P is of chimpanzee origin.

157. The composition according to any of claims 93-156, wherein a and/or b and/or P is of gorilla origin.

158. The composition according to any of claims 93-157, wherein a and/or b and/or P is of orangutan origin.

159. The composition according to any of claims 93-158, wherein a and/or b and/or P is of monkey origin.

160. The composition according to any of claims 93-159, wherein a and/or b and/or P is of Macaque origin.

161. The composition according to any of claims 93-160, wherein a and/or b and/or P is of porcine (swine/pig) origin.

162. The composition according to any of claims 93-161, wherein a and/or b and/or P is of bovine (cattle/antelopes) origin.

163. The composition according to any of claims 93-162, wherein a and/or b and/or P is of equine (horse) origin.

164. The composition according to any of claims 93-163, wherein a and/or b and/or P is of Camelides (camels) origin.

165. The composition according to any of claims 93-164, wherein a and/or b and/or P is of ruminant origin.

166. The composition according to any of claims 93-165, wherein a and/or b and/or P is of Canine (Dog) origin.

167. The composition according to any of claims 93-166, wherein a and/or b and/or P is of Feline (Cat) origin.

168. The composition according to any of claims 93-167, wherein a and/or b and/or P is of Bird origin.

169. The composition according to any of claims 93-168, wherein a and/or b and/or P is of Chicken origin.

170. The composition according to any of claims 93-169, wherein a and/or b and/or P is of Turkey origin.

171. The composition according to any of claims 93-170, wherein a and/or b and/or P is of Fish origin.

172. The composition according to any of claims 93-171, wherein a and/or b and/or P is of Reptile origin.

173. The composition according to any of claims 93-172, wherein a and/or b and/or P is of Amphibian origin.

174. The composition according to any of claims 93-173, wherein (a-b-P) is a class 1 MHC-peptide complex.

175. The composition according to any of claims 93-174, wherein (a-b-P) is a class 2 MHC-peptide complex.

176. The composition according to any of claims 93-175, wherein the MHC-peptide complex (a-b-P) is attached to a multimerization domain comprising an avidin or streptavidin via a linkage comprising a biotin moiety.

177. The composition according to any of claims 93 to 176, wherein P and/or a and/or b is chemically modified.

178. The composition according to any of claims 93 to 177, wherein P and/or a and/or b is pegylated.

179. The composition according to any of claims 93 to 178, wherein P and/or a and/or b is phosphorylated.

180. The composition according to any of claims 93 to 179, wherein P and/or a and/or b is glycosylated.

181. The composition according to any of claims 93 to 180, wherein one of the amino acid residues of the peptide P and/or a and/or b is substituted with another amino acid.

182. The composition according to any of claims 93 to 181, wherein a and b are both full-length peptides.

183. The composition according to any of claims 93 to 182, wherein a is a full-length peptide.

184. The composition according to any of claims 93 to 183, wherein b is a full-length peptide.

185. The composition according to any of claims 93 to 184, wherein a is truncated.

186. The composition according to any of claims 93 to 185, wherein b is truncated.

187. The composition according to any of claims 93 to 186, wherein a and b are both truncated.

188. The composition according to any of claims 93 to 187, wherein a and b are covalently linked.

189. The composition according to any of claims 93 to 188, wherein a and P are covalently linked.

190. The composition according to any of claims 93 to 189, wherein b and P are covalently linked.

191. The composition according to any of claims 93 to 190, wherein a, b and P are covalently linked.

192. The composition according to any of claims 93 to 191, wherein a and b are non-covalently linked.

193. The composition according to any of claims 93 to 192, wherein a and P are non-covalently linked.

194. The composition according to any of claims 93 to 193, wherein b and P are non-covalently linked.

195. The composition according to any of claims 93 to 194, wherein a, b and P are non-covalently linked.

196. The composition according to any of claims 93 to 195, wherein a is not included in the (a-b-P) complex.

197. The composition according to any of claims 93 to 196, wherein b is not included in the (a-b-P) complex.

198. The composition according to any of claims 93 to 197, wherein P is not included in the (a-b-P) complex.

199. The composition according to any of claims 93 to 198, wherein the MHC-peptide complex is linked to at least one of the one or more multimerization domains by a linker moiety.

200. The composition according to any of claims 93 to 199, wherein the MHC-peptide complex is linked to at least one of the one or more multimerization domains by a covalent linker moiety.

201. The MHC multimer according to claims 199 and 200, wherein the linkage of at least one of the one or more multimerization domains and at least one MHC-peptide complexes is formed by a binding entity X attached to, or being part of, at least one of the one or more multimerization domains, and a binding entity Y attached to, or being part of at least one of the MHC-peptide complexes.

202. The composition according to claims 199 and 200, wherein the linker moiety linking at least one of the one or more multimerization domains and the MHC-peptide complex comprises the linker moiety XY, wherein the linker moiety XY results from a reaction of the moiety X comprising one or more reactive groups and the moiety Y comprising one or more reactive groups, wherein at least some of said reactive groups are capable of reacting with each other.

203. The composition according to claim 202, wherein the moiety X comprises a nucleophilic group.

204. The composition according to claim 203, wherein the nucleophilic group is selected from the group consisting of —NH₂, —OH, —SH, —NH—NH₂, —CN.

205. The composition according to claim 202, wherein the moiety Y comprises an electrophilic group.

206. The composition according to claim 205, wherein the electrophilic group is selected from the group consisting of CHO, COOH, CO, NHS-ester, tosyl activated ester, acidanhydride other activated esters.

207. The composition according to claims 199 and 200, wherein at least one of the reactive groups on one of the moieties X and Y comprises a radical capable of reacting with a reactive group forming part of the other moiety.

208. The composition according to claims 199 and 200, wherein X and Y comprises reactive groups natively associated with the one or more multimerization domains and/or the MHC-peptide complexes.

209. The composition according to claims 199 and 200, wherein X and Y comprises reactive groups not natively associated with the one or more multimerization domains and/or the MHC-peptide complex.

210. The composition according to claims 199 and 200, wherein the linker moiety forms a covalent link between at least one of the one or more multimerization domains and at least one of the MHC-peptide complexes.

211. The composition according to claims 199 and 200, wherein the reactive groups of MHC-peptide complexes include amino acid side chains selected from the group —NH₂, —OH, —SH, and —NH—.

212. The composition according to claims 199 and 200, wherein the reactive groups of multimerization domains include hydroxyls of polysaccharides such as dextrans.

213. The composition according to claims 199 and 200, wherein the reactive groups of multimerization domains selected from the group amino acid side chains comprising —NH₂, —OH, —SH, and —NH— of polypeptides.

214. The composition according to claims 199 and 200, wherein one of the polypeptides of the MHC-peptide complex is covalently or non-covalently linked by a protein fusion to the multimerization domain.

215. The composition according to claims 199 and 200, wherein one of the polypeptides of the MHC-peptide complex is linked by a protein fusion to the multimerization domain, wherein an acyl group and an amino group react to form an amide bond.

216. The composition according to any of claims 93-215, wherein one of the polypeptides of the MHC-peptide complex is a β2M polypeptide.

217. The composition according to any of claims 93-216, wherein one of the polypeptides of the MHC-peptide complex is a MHC I heavy chain polypeptide.

218. The composition according to any of claims 93-217, wherein one of the polypeptides of the MHC-peptide complex is an antigenic peptide.

219. The composition according to any of claims 93-218, wherein one of the polypeptides of the MHC-peptide complex is a MHC II α-chain polypeptide.

220. The composition according to any of claims 93-219, wherein one of the polypeptides of the MHC-peptide complex is a MHC II β-chain polypeptide

221. The composition according to any of claims 93-220, wherein one of the polypeptides of the MHC-peptide complex is linked by non-native reactive groups to the multimerization domain

222. The composition according to claim 221, wherein the non-native reactive groups include reactive groups that are attached to the multimerization domain through association of a linker molecule comprising the reactive group.

223. The composition according to claim 221, wherein the non-native reactive groups include reactive groups that are attached to the MHC-peptide complex through association of a linker molecule comprising the reactive group.

224. The composition according to any of claim 108, 127 or 212, wherein dextran is activated by reaction of the dextran hydroxyls with divinyl sulfon

225. The composition according to claim 224, wherein dextran is activated by a multistep reaction that results in the decoration of the dextran with maleimide groups

226. The composition according to any of claims 93-225, wherein the multimerization domain comprises one or more nucleophilic groups

227. The composition according to claim 226, wherein the nucleophilic group is selected from the group —NH₂, —OH, —SH, —CN, —NH—NH₂

228. The composition according to any of claims 93-227, wherein the multimerization domain is selected from the group polysaccharides, polypeptides comprising e.g. lysine, serine, and cysteine.

229. The composition according to any of claims 93-228, wherein the multimerization domain comprises one or more electrophilic groups.

230. The composition according to claim 229, wherein the electrophilic group is selected from the group —COOH, —CHO, —CO, NHS-ester, tosyl-activated ester, and other activated esters, acid-anhydrides.

231. The composition according to any of claims 93-230, wherein the multimerization domain is selected from the group of polypeptides comprising e.g. glutamate and aspartate, or vinyl sulfone activated dextran.

232. The composition according to any of claims 93-231, wherein the multimerization domain comprises one or more radicals.

233. The composition according to any of claims 93-232, wherein the multimerization domain comprises one or more conjugated double bonds.

234. The composition according to any of claims 93-233, wherein the MHC-peptide complex comprises one or more nucleophilic groups.

235. The composition according to claim 234, wherein the nucleophilic group is selected from the group —NH₂, —OH, —SH, —CN, —NH—NH₂

236. The composition according to any of claims 93-235, wherein the MHC-peptide complex comprises one or more electrophilic groups.

237. The composition according to claim 236, wherein the electrophilic group is selected from the group —COOH, —CHO, —CO, NHS-ester, tosyl-activated ester, and other activated esters, acid-anhydrides.

238. The composition according to any of claims 93-237, wherein the MHC-peptide complex comprises one or more radicals.

239. The composition according to any of claims 93-238, wherein the MHC-peptide complex comprises one or more conjugated double bonds

240. The composition according to any of claims 93-239, wherein the multimerization domain comprises one or more beads and one or more linker moieties.

241. The composition according to claim 240, wherein the linker is a flexible linker.

242. The composition according to claim 240, wherein the linker is a rigid linker.

243. The composition according to claim 240, wherein the linker is a water-soluble linker.

244. The composition according to claim 240, wherein the linker is a cleavable linker.

245. The composition according to claim 244, wherein the cleavable linker is selected from linkers depicted in (FIG. 2) in PCT/DK2008/050167.

246. The composition according to claim 244, wherein the cleavable linker is cleavable at physiological conditions

247. The composition according to any of claims 93-246, wherein the MHC-peptide complex is linked to at least one of the one or more multimerization domains by a non-covalent linker moiety.

248. The composition according to claim 247, wherein the non-covalent linkage comprises natural dimerization.

249. The composition according to claim 248, wherein the natural dimerization comprises antigen-antibody pairs or coiled coil structures.

250. The composition according to claim 248, wherein the natural dimerization comprises DNA-DNA interactions.

251. The composition according to claim 247, wherein the non-covalent linkage comprises natural interactions.

252. The composition according to claim 251, wherein the natural interaction comprises biotin and streptavidin.

253. The composition according to claim 116, wherein the bead is coated with streptavidin monomers, which in turn are associated with biotinylated MHC complexes

254. The composition according to claim 116, wherein the bead is coated with streptavidin tetramers each of which being independently associated with 0, 1, 2, 3, or 4 biotinylated MHC complexes

255. The composition according to claim 116, wherein the bead is coated with polysaccharide, such as a polysaccharide comprising dextran moieties.

256. The composition according to claim 251, wherein the natural interaction comprises the interaction of MHC complexes (comprising full-length polypeptide chains, including the transmembrane portion) with the cell membrane of for example dendritic cells

257. The composition according to claim 247, wherein the non-covalent linkage comprises artificial interactions

258. The composition according to claim 257, wherein the artificial interaction comprises His₆ tag interacting with Ni-NTA

259. The composition according to claim 257, wherein the artificial interaction comprises PNA-PNA

260. The composition according to claim 247, wherein the non-covalent linkage comprises non-specific adsorption

261. The composition according to claim 260, wherein the non-specific adsorption comprises adsorption of proteins onto surfaces

262. The composition according to claim 247, wherein the non-covalent linkage comprises the pentamer structure

263. The composition according to claim 247, wherein the non-covalent linkage comprises interactions selected from the group streptavidin/biotin, avidin/biotin, antibody/antigen, DNA/DNA, DNA/PNA, DNA/RNA, PNA/PNA, LNA/DNA, leucine zipper e.g. Fos/Jun, IgG dimeric protein, IgM multivalent protein, acid/base coiled-coil helices, chelate/metal ion-bound chelate, streptavidin (SA) and avidin and derivatives thereof, biotin, immunoglobulins, antibodies (monoclonal, polyclonal, and recombinant), antibody fragments and derivatives thereof, leucine zipper domain of AP-1 (jun and fos), hexa-his (metal chelate moiety), hexa-hat GST (glutathione S-transferase) glutathione affinity, Calmodulin-binding peptide (CBP), Strep-tag, Cellulose Binding Domain, Maltose Binding Protein, S-Peptide Tag, Chitin Binding Tag, Immuno-reactive Epitopes, Epitope Tags, E2Tag, HA Epitope Tag, Myc Epitope, FLAG Epitope, AU1 and AU5 Epitopes, Glu-Glu Epitope, KT3 Epitope, IRS Epitope, Btag Epitope, Protein Kinase-C Epitope, VSV Epitope, lectins that mediate binding to a diversity of compounds, including carbohydrates, lipids and proteins, e.g. Con A (Canavalia ensiformis) or WGA (wheat germ agglutinin) and tetranectin or Protein A or G (antibody affinity).

264. The composition according to any of claims 93 to 263, wherein the MHC multimer comprises stabilized empty MHC complexes and/or stabilized MHC-peptide complexes.

265. The composition according to claim 264, wherein the MHC multimer comprises a soluble form of MHC I where the transmembrane and cytosolic domains of the membrane-anchored MHC complexes have been removed.

266. The composition according to claim 264, wherein the MHC multimer comprises a soluble form of MHC II where the transmembrane and cytosolic domains of the membrane-anchored MHC complexes have been removed.

267. The composition according to claim 264, wherein the stabilized empty MHC complexes and/or stabilized MHC-peptide complexes have been stabilized by generation of covalent protein-fusions.

268. The composition according to claim 264, wherein the stabilized empty MHC complexes and/or stabilized MHC-peptide complexes have been stabilized by stabilization of the MHC I molecules by introduction of one or more linkers between the individual components of the MHC I complex such as generation of a complex consisting of a heavy chain fused with β2m through a linker and a soluble peptide, a heavy chain fused to β2m through a linker, a heavy chain/β2m dimer covalently linked to a peptide through a linker to either heavy chain or β2m, or where there can or can not be a linker between the heavy chain and β2m, a heavy chain fused to a peptide through a linker, or the α1 and α2 subunits of the heavy chain fused to a peptide through a linker.

269. The composition according to claim 268, wherein each of the heavy chain, β2m and the peptide are truncated.

270. The composition according to claim 268, wherein the linker is a flexible linker.

271. The composition according to claim 268, wherein the linker is made of glycine and/or serine.

272. The composition according to claim 268, wherein the linker is between 5-20 residues long, such as from 5-6 residues long, for example from 6-8 residues long, such as from 8-10 residues long, for example from 10-12 residues long, such as from 12-14 residues long, for example from 14-16 residues long, such as from 16-18 residues long and for example from 18-20 residues long.

273. The composition according to claim 268, wherein the linker is longer than 20 residues long.

274. The composition according to claim 268, wherein the linker is shorter than 5 residues long.

275. The composition according to claim 268, wherein the linker is rigid with a defined structure.

276. The composition according to claim 268, wherein the linker is made of amino acids like glutamate, alanine, lysine, and leucine creating e.g. a more rigid structure.

277. The composition according to claim 268, wherein the stabilized empty MHC complexes and/or stabilized MHC-peptide complexes comprises heavy chain-β2m fusion proteins, wherein the COOH terminus of β2m can be covalently linked to the NH₂ terminus of the heavy chain, or the NH₂ terminus of β2m can be linked to the COOH terminus of the heavy chain.

278. The composition according to claim 268, wherein the stabilized empty MHC complexes and/or stabilized MHC-peptide complexes comprises a fusion-protein comprising a β2m domain, or a truncated β2m domain, inserted into the heavy chain.

279. The composition according to claim 268, wherein the stabilized empty MHC complexes and/or stabilized MHC-peptide complexes comprises a fusion-protein comprising a heavy chain domain, or a truncated heavy chain, inserted into the β2m chain, to form a fusion-protein of the form “β2m(first part)-heavy chain-β2m(last part)”.

280. The composition according to claim 268, wherein the stabilized empty MHC complexes and/or stabilized MHC-peptide complexes comprises peptide-β2m fusion proteins, wherein the COOH terminus of the peptide is linked to the NH₂ terminus of β2m or the peptide is linked to the COOH terminal of β2m via its NH₂ terminus.

281. The composition according to claim 268, wherein the stabilized empty MHC complexes and/or stabilized MHC-peptide complexes comprises heavy chain-peptide fusion proteins, wherein the NH₂ terminus of the heavy chain is fused to the COOH terminus of the peptide, or the fusion is between the COOH terminus of the heavy chain and the NH₂ terminus of the peptide.

282. The composition according to claim 268, wherein the stabilized empty MHC complexes and/or stabilized MHC-peptide complexes comprises heavy chain-β2m-peptide fusion proteins, wherein the NH₂ terminus of the heavy chain is fused to the COOH terminus of β2m and the NH₂ terminus of β2m can be fused to the COOH terminus of the peptide.

283. The composition according to claim 268, wherein the stabilized empty MHC complexes and/or stabilized MHC-peptide complexes comprises non-covalent stabilization by binding to an unnatural component.

284. The composition according to claim 283, wherein the unnatural component bind to both the heavy chain and the β2m.

285. The composition according to claim 283, wherein the unnatural component bind to either β2m or heavy chain, and in this way stabilize the polypeptide in its correct conformation, and in this way increase the affinity of the heavy chain for β2m and/or peptide, or increase the affinity of β2m for peptide.

286. The composition according to claim 283, wherein the unnatural component is one or more antibodies.

287. The MHC multimer according to claim 286, wherein the one or more antibodies can be selected from the group consisting of as truncated or full-length antibodies (of isotype IgG, IgM, IgA, IgE), Fab, scFv or bi-Fab fragments or diabodies.

288. The MHC multimer according to claim 286, wherein the one or more antibodies is one or more antibodies capable of binding the MHC I molecule by interaction with the heavy chain as well as β2m.

289. The MHC multimer according to claim 286, wherein the one or more antibodies is one or more bispecific antibodies that binds with one arm to the heavy chain and the other arm to the β2m of the MHC complex.

290. The MHC multimer according to claim 286, wherein the one or more antibodies is monospecific, and bind at the interface between heavy chain and β2m.

291. The MHC multimer according to claim 286, wherein the one or more antibodies is one or more antibodies capable of binding the heavy chain but only when the heavy chain is correct folded.

292. The MHC multimer according to claim 286, wherein the one or more antibodies is the antibody produced by the clone W6/32 such as M0736 or the like that recognizes a conformational epitope on intact human and some monkey MHC complexes comprising β2m, heavy chain and peptide.

293. The composition according to claim 283, wherein the unnatural component is one or more peptides.

294. The composition according to claim 283, wherein the unnatural component is one or more aptamers.

295. The composition according to claim 283, wherein the unnatural component is one or more molecules with the ability to bind peptides stretches of the MHC complex.

296. The composition according to claim 264, wherein the stabilized empty MHC complexes and/or stabilized MHC-peptide complexes comprises generation of modified proteins or protein components.

297. The composition according to claim 264, wherein the stabilized empty MHC complexes and/or stabilized MHC-peptide complexes comprises improved stability of a MHC I complex by increasing the affinity of the binding peptide for the MHC complex.

298. The composition according to claim 296, wherein the generation of modified proteins or protein components comprises mutagenesis of one or more amino acids at relevant positions in the peptide.

299. The composition according to claim 296, wherein the generation of modified proteins or protein components comprises substitution of one or more amino acids at relevant positions in the peptide.

300. The composition according to claim 296, wherein the generation of modified proteins or protein components comprises chemical modifications of amino acids at relevant positions in the peptide.

301. The composition according to claim 296, wherein the generation of modified proteins or protein components comprises introduction by synthesis of non-natural amino acids at relevant positions in the peptide.

302. The composition according to claim 296, wherein the generation of modified proteins or protein components comprises mutations, chemical modifications, insertion of natural or non-natural amino acids or deletions in the peptide binding cleft, i.e. in the binding pockets that accommodate peptide side chains responsible for anchoring the peptide to the peptide binding cleft.

303. The composition according to claim 296, wherein the generation of modified proteins or protein components comprises introduction of one or more reactive groups into the antigenic peptide;

304. The composition according to claim 296, wherein the generation of modified proteins or protein components comprises mutations, chemical modifications, insertion of natural or non-natural amino acids or deletions in the heavy chain and/or β2m at positions outside the peptide-binding cleft.

305. The composition according to claim 296, wherein the generation of modified proteins or protein components comprises removal of “unwanted cysteine residues” in the heavy chain by mutation, chemical modification, amino acid exchange or deletion.

306. The composition according to claim 264, wherein the stabilized empty MHC complexes and/or stabilized MHC-peptide complexes comprises covalent stabilization of MHC I complex, wherein a linker is covalently attached between two of the subunits of the MHC complex such as a linker between peptide and heavy chain or between heavy chain and beta2 microglobulin.

307. The composition according to claim 264, wherein the stabilized empty MHC complexes and/or stabilized MHC-peptide complexes comprises eukaryotic expression systems for production of MHC II molecules such as stable Drosophila cell transfectants, baculovirus infected insect cells, CHO cells or other mammalian cell lines suitable for expression of proteins.

308. The composition according to claim 264, wherein the stabilized empty MHC complexes and/or stabilized MHC-peptide complexes comprises generation of covalent protein-fusions.

309. The composition according to claim 264, wherein the stabilized empty MHC complexes and/or stabilized MHC-peptide complexes comprises stabilization of MHC II complexes by introduction of one or more linkers e.g. between the individual components of the MHC II complex such as a α/β dimer with a linker between α-chain and β-chain; a α/β dimer covalently or non-covalently linked to the peptide via a linker to either the α-chain or β-chain; a α/β dimer, covalently or non-covalently linked by a linker between the α-chain and β-chain, and where the dimer is covalently or non-covalently linked to the peptide or a α/β dimer with a linker between α-chain and β-chain, where the dimer is combined with a peptide covalently or non-covalently linked to either α-chain or β-chain.

310. The composition according to claim 309, wherein the linker is a flexible linker.

311. The composition according to claim 309, wherein the linker is made of glycine and/or serine.

312. The composition according to claim 309, wherein the linker is between 5-20 residues long, such as from 5-6 residues long, for example from 6-8 residues long, such as from 8-10 residues long, for example from 10-12 residues long, such as from 12-14 residues long, for example from 14-16 residues long, such as from 16-18 residues long and for example from 18-20 residues long.

313. The composition according to claim 309, wherein the linker is longer than 20 residues long.

314. The composition according to claim 309, wherein the linker is shorter than 5 residues long.

315. The composition according to claim 309, wherein the linker is rigid with a more defined structure, e.g. made of amino acids like glutamate, alanine, lysine, and leucine.

316. The composition according to claim 264, wherein the stabilized empty MHC complexes and/or stabilized MHC-peptide complexes comprises peptides linked to the NH₂— or COOH-terminus of either α-chain or β-chain.

317. The composition according to claim 264, wherein the stabilized empty MHC complexes and/or stabilized MHC-peptide complexes comprises peptides linked to the NH₂-terminus of the β-chain via their COOH-terminus, since the linker required is shorter than if the peptide is linked to the COOH-terminus of the β-chain.

318. The composition according to claim 264, wherein the stabilized empty MHC complexes and/or stabilized MHC-peptide complexes comprises linkage of α-chain to β-chain via the COOH-terminus of the β-chain to the NH₂-terminus of the α-chain or from the COOH-terminus of the α-chain to the NH₂-terminus of the β-chain.

319. The composition according to claim 264, wherein the stabilized empty MHC complexes and/or stabilized MHC-peptide complexes comprises a three-molecule fusion protein consisting of α-chain, β-chain and peptide e.g. where one linker connect the COOH-terminus of the β-chain with the NH₂-terminus of the α-chain and another linker connects the COOH-terminal of the peptide with the NH₂-terminal of the β-chain or one linker joins the COOH-terminus of the α-chain with the NH₂-terminus of the β-chain and the second linker joins the NH₂-terminus of the peptide with the COOH-terminus of the β-chain.

320. The composition according to claim 264, wherein the stabilized empty MHC complexes and/or stabilized MHC-peptide complexes comprises non-covalent stabilization by binding ligand.

321. The composition according to claim 264, wherein the stabilized empty MHC complexes and/or stabilized MHC-peptide complexes comprises non-covalent binding of ligands to the MHC II complex to promote assembly of α- and β-chain by bridging the two chains, or by binding to either of the α- or β-chains, and in this way stabilize the conformation of α or β, that binds β or α, respectively, and/or that binds the peptide.

322. The composition according to claim 321, wherein the ligands are one or more antibodies.

323. The composition according to claim 322, wherein the one or more antibodies are one or more antibodies binding the MHC complex distal to the interaction site with TCR, i.e. distal to the peptide-binding cleft.

324. The composition according to claim 322, wherein the one or more antibodies are any truncated or full length antibody of any isotype (e.g. IgG, IgM, IgA or IgE), a bi-Fab fragment or a diabody.

325. The composition according to claim 322, wherein the one or more antibodies are bispecific with one arm binding to the α-chain and the other arm binding to the β-chain.

326. The composition according to claim 322, wherein the one or more antibodies are monospecific and directed to a sequence fused to the α-chain as well as to the β-chain.

327. The composition according to claim 322, wherein the one or more antibodies are monospecific and binds to a surface of the complex that involves both the α- and β-chain, e.g. both the α2- and β2-domain or both the α1- and β1-domain.

328. The composition according to claim 321, wherein the ligands are one or more peptides.

329. The composition according to claim 321, wherein the ligands are one or more aptamers.

330. The composition according to claim 321, wherein the ligands are one or more molecules with the ability to bind proteins.

331. The composition according to claim 321, wherein the ligands are one or more ligand that binds at the α-/β-chain interface, e.g. peptides and aptamers.

332. The composition according to claim 321, wherein the ligands are one or more ligands that bind the peptide, although, in this case it is important that the ligand does not interfere with the interaction of the peptide or binding cleft with the TCR.

333. The composition according to claim 264, wherein the stabilized empty MHC complexes and/or stabilized MHC-peptide complexes comprises non-covalent stabilization by induced multimerization.

334. The composition according to claim 333, wherein the multimerization comprises anchoring of the α- and β-chains in the cell membrane leading to stabilization of the MHC II complexes.

335. The composition according to claim 333, wherein the multimerization comprises stabilization of the α/β-dimer by attachment of the MHC II chains to the Fc regions of an antibody, leading to a stable α/β-dimer, where α and β are held together by the tight interactions between two Fc domains of an antibody.

336. The composition according to claim 333, wherein the multimerization comprises one or more dimerization domains.

337. The composition according to claim 333, wherein the multimerization comprises MHC II molecules incorporated into artificial membrane spheres like liposomes or lipospheres.

338. The composition according to claim 333, wherein the multimerization comprises MHC II molecules incorporated as monomers or as dimers in a membrane.

339. The composition according to claim 333, wherein the multimerization comprises biotinylation of α- as well as β-chain and the two chains brought together by binding to streptavidin.

340. The composition according to claim 333, wherein the multimerization comprises long flexible linkers such as extended glycine-serine tracts used to extend both chains, whereafter the chains are biotinylated at the end of such extended linkers and streptavidin is used as a scaffold to bring the chains together in the presence of the peptide, while the flexible linkers still allow the chains to orientate properly.

341. The composition according to claim 264, wherein the stabilized empty MHC complexes and/or stabilized MHC-peptide complexes comprises generation of modified proteins or protein components.

342. The composition according to claim 264, wherein the stabilized empty MHC complexes and/or stabilized MHC-peptide complexes comprises stabilization of MHC II complexes by covalent modifications of the protein.

343. The composition according to claim 264, wherein the stabilized empty MHC complexes and/or stabilized MHC-peptide complexes comprises increase of the affinity of the peptide for the MHC complex e.g. by exchange of the natural amino acids with other natural or non-natural amino acids at relevant positions in the peptide or by chemical modifications of amino acids at relevant positions in the peptide or mutations, chemical modifications, insertion of natural or non-natural amino acids or deletions can be introduced in the peptide-binding cleft or mutations, chemical modifications, insertion of natural or non-natural amino acids or deletions is introduced in α- and/or β-chain at positions outside the peptide-binding cleft.

344. The composition according to claim 264, wherein the stabilized empty MHC complexes and/or stabilized MHC-peptide complexes comprises replacement of the hydrophobic transmembrane regions of α-chain and β-chain by leucine zipper dimerisation domains (e.g. Fos-Jun leucine zipper; acid-base coiled-coil structure) to promote assembly of α-chain and β-chain.

345. The composition according to claim 264, wherein the stabilized empty MHC complexes and/or stabilized MHC-peptide complexes comprises introduction of one or more cysteine residues by amino acid exchange at the COOH-terminal of both α-chain and β-chain, to create disulfide bridges between the two chains upon assembly of the MHC complex.

346. The composition according to claim 264, wherein the stabilized empty MHC complexes and/or stabilized MHC-peptide complexes comprises removal of “unwanted cysteine residues” in either of the chains by mutation, chemical modification, amino acid exchange or deletion.

347. The composition according to claim 264, wherein the stabilized empty MHC complexes and/or stabilized MHC-peptide complexes comprises stabilization of MHC II complexes by chemically linking together the subunits and the peptide e.g. by a linker between peptide and α-chain, between peptide and β-chain, between α-chain and β-chain, or combination thereof.

348. The composition according to claim 264, wherein the stabilized empty MHC complexes and/or stabilized MHC-peptide complexes comprises chemically modified MHC complexes.

349. The composition according to claim 348, wherein the chemically modified MHC complexes comprises one or more amino acids reacted with one or more chemical cross linkers.

350. The composition according to claim 348, wherein the chemically modified MHC complexes comprises that the amino group at the N-terminal of both chains and of the peptide, as well as amino groups of lysine side chains, are nucleophilic and can be used in a chemical reaction.

351. The composition according to claim 350, wherein the chemical reaction is nucleophilic substitution by activation of electrophiles (e.g. acylation such as amide formation, pyrazolone formation, isoxazolone formation; alkylation; vinylation; disulfide formation),

352. The composition according to claim 350, wherein the chemical reaction is addition to carbon-hetero multiple bonds (e.g. alkene formation by reaction of phosphonates with aldehydes or ketones; arylation; alkylation of arenes/hetarenes by reaction with alkyl boronates or enolethers).

353. The composition according to claim 350, wherein the chemical reaction is nucleophilic substitution using activation of nucleophiles (e.g. condensations; alkylation of aliphatic halides or tosylates with enolethers or enamines).

354. The composition according to claim 350, wherein the chemical reaction is one or more cycloadditions.

355. The composition according to claim 350, wherein the chemical reaction comprises use of activated carboxylic acids such as NHS-ester, tetra and pentafluoro phenolic esters, anhydrides, acid chlorides and fluorides.

356. The composition according to claim 350, wherein the chemical reaction comprises use of sulphonyl chlorides.

357. The composition according to claim 350, wherein the chemical reaction comprises use of iso-Cyanates and/or isothiocyanates.

358. The composition according to claim 350, wherein the chemical reaction comprises use of Aldehydes, such as formaldehyde and glutardialdehyde.

359. The composition according to claim 350, wherein the chemical reaction comprises alkylation by maleimides, vinyl sulphones and halides.

360. The composition according to claim 350, wherein the chemical reaction comprises use of carboxylic acids at the C-terminal of both chains and peptide, as well as on the side chains of glutamic and aspartic acid, to introduce cross-links.

361. The composition according to claim 350, wherein the chemical reaction use of carbodiimides.

362. The composition according to claim 350, wherein the chemical reaction any chemistries that can be employed to form covalent cross-links.

363. The composition according to claim 350, wherein the chemical reaction comprises one or more chemical reagents that are bi-functional.

364. The composition according to claim 350, wherein the chemical reaction comprises one or more chemical reagents that are homo bi-functional such as glutardialdehyde.

365. The composition according to claim 350, wherein the chemical reaction comprises one or more chemical reagents that are hetero bi-functional such as GMBS (MaleimidoButyryloxy-Succinimide ester).

366. The composition according to claim 350, wherein the chemical reaction comprises use of two or more reagents.

367. The composition according to claim 350, wherein the chemical reaction comprises that GMBS is used to introduce maleimides on the α-chain, and iminothiolane is used to introduce thiols on the β-chain, whereafter the malemide and thiol can then form a thioether link between the two chains.

368. The composition according to claim 350, wherein the chemical reaction comprises one or more types of cross-links.

369. The composition according to claim 350, wherein the chemical reaction comprises that the folded MHC-complex can be reacted with dextrans possessing a large number (up to many hundreds) of vinyl sulphones, which can react with lysine residues on both the α and β chains as well as with lysine residues on the peptide protruding from the binding site, effectively cross linking the entire MHC-complex.

370. The composition according to claim 350, wherein the chemical reaction comprises activation of dextran e.g. with vinyl sulphones.

371. The composition according to claim 350, wherein the chemical reaction comprises that a dextran is reacted both with one or several MHC-complexes and one or more fluorescent protein such as APC.

372. The composition according to claim 350, wherein the chemical reaction comprises one or more chemical cross linkers.

373. The composition according to claim 350, wherein the chemical reaction comprises that one or more lysine residues are inserted into the α-chain, juxtaposed with glutamic acids in the β-chain, where after the introduced amino groups and carboxylic acids are reacted by addition of carbodiimide.

374. The composition according to claim 350, wherein the chemical reaction comprises that one or more dextran multimerization domain(s) are cross-linked with appropriately modified MHC-complexes; i.e. one or both chains of the MHC complex can be enriched with lysine residues, increasing reactivity towards the vinylsulphone dextran.

375. The composition according to claim 374, wherein the lysine residues are inserted at positions opposite the peptide binding cleft, orienting the MHC-complexes favourably for T-cell recognition.

376. The composition according to claim 350, wherein the chemical reaction comprises use of one or more extended and flexible cross-linkers.

377. The composition according to claim 264, wherein the stabilized empty MHC complexes and/or stabilized MHC-peptide complexes comprises stabilization with one or more soluble additives.

378. The composition according to claim 377, wherein the one or more soluble additives comprises one or more salts.

379. The composition according to claim 377, wherein the one or more soluble additives comprises one or more detergents.

380. The composition according to claim 377, wherein the one or more soluble additives comprises one or more organic solvents.

381. The composition according to claim 377, wherein the one or more soluble additives comprises one or more polymers.

382. The composition according to claim 377, wherein the one or more soluble additives comprises one or more soluble additives that increase the stability of MHC complexes.

383. The composition according to claim 377, wherein the one or more soluble additives comprises one or more soluble additives that increase the surface tension of the MHC complex.

384. The composition according to claim 377, wherein the one or more soluble additives comprises one or more of the soluble additives selected from the group consisting of sucrose, mannose, glycine, betaine, alanine, glutamine, glutamic acid, ammonium sulphate, glycerol, mannitol and sorbitol.

385. The composition according to claim 377, wherein the one or more soluble additives comprises one or more soluble additives that increase the surface tension of the MHC complex and simultaneously can interact with charged groups in the protein.

386. The composition according to claim 377, wherein the one or more soluble additives comprises one or more of the soluble additives selected from the group consisting of MgSO₄, NaCl, polyethyleneglycol, 2-methyl-2,4-pentanediol and guanidiniumsulphate.

387. The composition according to claim 377, wherein the one or more soluble additives comprises molar excess of peptide.

388. The composition according to claim 377, wherein the one or more soluble additives comprises molar excess β2m.

389. The composition according to claim 377, wherein the one or more soluble additives comprises molar excess β2m and molar excess of peptide identical to the peptide bound in the peptide-binding cleft.

390. The composition according to claim 377, wherein the one or more soluble additives comprises one or more of the soluble additives selected from the group consisting of BSA, fetal and bovine calf serum, and other protein components in serum with a protein stabilizing effect.

391. The composition according to claim 377, wherein the one or more soluble additives are added to any solution comprising MHC complexes in order to increase the stability of the molecule.

392. The composition according to claim 377, wherein the one or more soluble additives are added during the refolding process.

393. The composition according to claim 377, wherein the one or more soluble additives are added to the formed MHC complex.

394. The composition according to claim 377, wherein the one or more soluble additives are added to a solution of MHC multimers comprising several MHC complexes.

395. The composition according to any of claims 93 to 394 further comprising one or more molecules with adjuvant effect.

396. The composition according to any of claims 93 to 395 further comprising one or more immune targets.

397. The MHC multimer according to any of claim 396, wherein the one or more immune targets is an antigen.

398. The composition according to any of claims 93 to 397 further comprising one or more molecules with biological activity.

399. The composition according to any of claims 93 to 398 further comprising one or more molecules with a cytotoxic effect.

400. The composition according to any of claims 93 to 399 further comprising one or more molecules selected from the group consisting of enzymes, regulators of receptor activity, receptor ligands, immune potentiators, drugs, toxins, co-receptors, proteins, peptides, sugar moieties, lipid groups, nucleic acids including siRNA, nano particles, and small molecules.

401. The composition according to any of claims 93 to 400 further comprising one or more molecules selected from the group consisting of HIV gp120, HIV-GAG gp 27, HSP70, and MHC class II proteins or peptides or combinations thereof.

402. The composition according to any of claims 93 to 401 further comprising one or more immuno active molecules.

403. The composition according to claim 402, wherein the one or more immuno active molecules are identical.

404. The composition according to claim 402, wherein the one or more immuno active molecules are different.

405. The composition according to claim 402, wherein the one or more immuno active molecules are selected from the group consisting of biological active molecules including proteins, co-stimulatory molecules, cell modulating molecules, receptors, accessory molecules, adhesion molecules, natural ligands, and toxic molecules, as well as antibodies and recombinant binding molecules to any of the foregoing, and combinations thereof.

406. The composition according to claim 402, wherein the one or more immuno active molecules comprises one or more molecules selected from the group consisting of MHC Class I-like proteins like MIC A, MIC B, CDId, HLA E, HLA F, HLA G, HLA H, ULBP-1, ULBP-2, and ULBP-3, co-stimulatory molecules such as CD2, CD3, CD4, CD5, CD8, CD9, CD27, CD28, CD30, CD69, CD134 (OX40), CD137 (4-1BB), CD147, CDw150 (SLAM), CD152 (CTLA-4), CD153 (CD30L), CD40L (CD154), NKG2D, ICOS, HVEM, HLA Class II, PD-1, Fas (CD95), FasL expressed on T and/or NK cells, CD40, CD48, CD58, CD70, CD72, B7.1 (CD80), B7.2 (CD86), B7RP-1, B7-H3, PD-L1, PD-L2, CD134L, CD137L, ICOSL, LIGHT expressed on APC and/or tumour cells, cell modulating molecules such as CD16, NKp30, NKp44, NKp46, NKp80, 2B4, KIR, LIR, CD94/NKG2A, CD94/NKG2C expressed on NK cells, IFN-alpha, IFN-beta, IFN-gamma, IL-1, IL-2, IL-3, IL-4, IL-6, IL-7, IL-8, IL-10, IL-11, IL-12, IL-15, CSFs (colony-stimulating factors), vitamin D3, IL-2 toxins, cyclosporin, FK-506, rapamycin, TGF-beta, clotrimazole, nitrendipine, and charybdotoxin, accessory molecules such as LFA-1, CDIIa/18, CD54 (ICAM-1), CD106 (VCAM), and CD49a, b, c, d, e, f/CD29 (VLA-4), adhesion molecules such as ICAM-1, ICAM-2, GlyCAM-1, CD34, anti-LFA-1, anti-CD44, anti-beta7, chemokines, CXCR4, CCR5, anti-selectin L, anti-selectin E, and anti-selectin P, toxic molecules selected from toxins, enzymes, antibodies, radioisotopes, chemiluminescent substances, bioluminescent substances, polymers, metal particles, and haptens, such as cyclophosphamide, methotrexate, Azathioprine, mizoribine, 15-deoxyspergualin, neomycin, staurosporine, genestein, herbimycin A, Pseudomonas exotoxin A, saporin, Rituxan, Ricin, gemtuzumab ozogamicin, Shiga toxin, heavy'metals like inorganic and organic mercurials, and FN18-CRM9, radioisotopes such as incorporated isotopes of iodide, cobalt, selenium, tritium, and phosphor, and haptens such as DNP, and digoxiginin, and combinations of any of the foregoing, as well as antibodies (monoclonal, polyclonal, and recombinant) to the foregoing, where relevant and antibody derivatives or fragments thereof.

407. The composition according to claim 402, wherein the one or more immuno active molecules are derived from viral or bacterial proteins or fragments thereof.

408. The composition according to claim 402, wherein the one or more immuno active molecules are attached to the multimerization domain(s) either directly, through one or more linkers or via one or more of the binding entities or one or more multimerization domains.

409. The composition according to claim 402, wherein the one or more immuno active molecules are linked to another immunoactive molecules and then attached to one or more multimerization domains.

410. The composition according to any of claims 93 to 409, wherein the MHC multimer is covalently or non-covalently associated with various molecules such as molecules with adjuvant effects, immune targets such as antigens, molecules with biological activity such as enzymes, regulators of receptor activity, receptor ligands, immune potentiators, drugs, toxins, co-receptors, proteins and peptides in general; sugar moieties; lipid groups; nucleic acids including siRNA; nano particles; small molecules.

411. The composition according to any of claims 93 to 410, wherein the MHC multimer is covalently or non-covalently associated with one or more biologically active molecules and/or one or more immuno active molecules.

412. The composition according to claim 411, wherein the one or more biologically active molecules and/or one or more immuno active molecules are attachment by chemical reactions between reactive groups on the biologically active molecule or immuno active molecule and reactive groups of the multimerisation domain and/or between reactive groups on the biologically active molecule or immuno active molecule and reactive groups of the MHC-peptide complex.

413. The composition according to claim 411, wherein the one or more biologically active molecules and/or one or more immuno active molecules are attachment by non-covalent interaction between part of the multimerisation domain and part of the biological active molecule or immuno active molecule; or between part of the MHC-peptide complex and part of the biological active molecule or immuno active molecule.

414. The composition according to claim 411, wherein the one or more biologically active molecules and/or one or more immuno active molecules are attachment by covalent and non-covalent attachment of the biologically molecule or immuno active molecule to the multimerisation domain by a linker molecule.

415. The composition according to claim 411, wherein the one or more biologically active molecules and/or one or more immuno active molecules are attachment by repetitively attachment aiding to recognition by and stimulation of the innate immune system via Toll or other receptors.

416. The composition according to any of claims 93 to 415 comprising a plurality of identical or different multimerization domains linked by a multimerization domain linking moiety,
wherein at least one of said multimerization domains is associated with (a-b-P)ₙ,
wherein n>1,
wherein a and b together form a functional MHC protein capable of binding the peptide P, when P is present
wherein (a-b-P) is the MHC-peptide complex formed when the peptide P binds to the functional MHC protein.

417. The composition according to claim 416, wherein the plurality of identical or different multimerization domains is in the range of from 2 to 100, such as 2 to 5, 5 to 10, 10 to 20, 20 to 30, 30 to 40, 40 to 50, 50 to 60, 60 to 70, 70 to 80, 80 to 90, 90 to 100.

418. The composition according to claim 416, wherein the MHC multimer comprises a first multimerization domain linked to a second multimerization domain.

419. The composition according to claim 418, wherein the first multimerization domain and the second multimerization domain is independently selected from the group consisting of multimerization domains cited in any of claims 93 to 415.

420. The composition according to claim 418, wherein the association is a covalent linkage so that one or more of the n MHC-peptide complexes is covalently linked to the first multimerization domains.

421. The composition according to claim 418, wherein the association is a non-covalent association so that one or more of the n MHC-peptide complexes is non-covalently associated with the first multimerization domain.

422. The composition according to claim 418, wherein the first multimerization domain comprises one or more scaffolds.

423. The composition according to claim 418, wherein the first multimerization domain comprises one or more carriers.

424. The composition according to claim 418, wherein the first multimerization domain comprises at least one scaffold and at least one carrier.

425. The composition according to claim 418, wherein the first multimerization domain comprises one or more optionally substituted organic molecules.

426. The composition according to claim 425, wherein the optionally substituted organic molecule comprises one or more functionalized cyclic structures.

427. The composition according to claim 426, wherein the one or more functionalized cyclic structures comprises one or more benzene rings.

428. The composition according to claim 425, wherein the optionally substituted organic molecule comprises a scaffold molecule comprising at least three reactive groups, or at least three sites suitable for non-covalent attachment.

429. The composition according to claim 418, wherein the first multimerization domain comprises one or more biological cells, such as antigen presenting cells or dendritic cells.

430. The composition according to claim 418, wherein the first multimerization domain comprises one or more membranes.

431. The composition according to claim 430, wherein the one or more membranes comprises liposomes or micelles.

432. The composition according to claim 418, wherein the first multimerization domain comprises one or more polymers.

433. The composition according to claim 432, wherein the one or more polymers are selected from the group consisting of the group consisting of polysaccharides.

434. The composition according to claim 433, wherein the polysaccharide comprises one or more dextran moieties.

435. The composition according to claim 418, wherein the first multimerization domain comprises one or more entities selected from the group consisting of an IgG domain, a coiled-coil polypeptide structure, a DNA duplex, a nucleic acid duplex, PNA-PNA, PNA-DNA, DNA-RNA.

436. The composition according to claim 418, wherein the first multimerization domain comprises an avidin, such as streptavidin.

437. The composition according to claim 418, wherein the first multimerization domain comprises an antibody.

438. The composition according to claim 437, wherein the antibody is selected from the group consisting of polyclonal antibody, monoclonal antibody, IgA, IgG, IgM, IgD, IgE, IgG1, IgG2, IgG3, IgG4, IgA1, IgA2, IgM1, IgM2, humanized antibody, humanized monoclonal antibody, chimeric antibody, mouse antibody, rat antibody, rabbit antibody, human antibody, camel antibody, sheep antibody, engineered human antibody, epitope-focused antibody, agonist antibody, antagonist antibody, neutralizing antibody, naturally-occurring antibody, isolated antibody, monovalent antibody, bispecific antibody, trispecific antibody, multispecific antibody, heteroconjugate antibody, immunoconjugates, immunoliposomes, labeled antibody, antibody fragment, domain antibody, nanobody, minibody, maxibody, diabody, fusion antibody.

439. The composition according to claim 418, wherein the first multimerization domain comprises one or more small organic scaffold molecules.

440. The composition according to claim 418, wherein the first multimerization comprises one or more further polypeptides in addition to a and b.

441. The composition according to claim 418, wherein the first multimerization comprises one or more protein complexes.

442. The composition according to claim 418, wherein the first multimerization comprises one or more beads

443. The composition according to claim 418, wherein the first multimerization domain comprises one or more compounds selected from the group consisting of agarose, sepharose, resin beads, glass beads, pore-glass beads, glass particles coated with a hydrophobic polymer, chitosan-coated beads, SH beads, latex beads, spherical latex beads, allele-type beads, SPA bead, PEG-based resins, PEG-coated bead, PEG-encapsulated bead, polystyrene beads, magnetic polystyrene beads, glutathione agarose beads, magnetic bead, paramagnetic beads, protein A and/or protein G sepharose beads, activated carboxylic acid bead, macroscopic beads, microscopic beads, insoluble resin beads, silica-based resins, cellulosic resins, cross-linked agarose beads, polystyrene beads, cross-linked polyacrylamide resins, beads with iron cores, metal beads, dynabeads, Polymethylmethacrylate beads activated with NHS, streptavidin-agarose beads, polypropylene, polyethylene, dextran, nylon, amylases, natural and modified celluloses, nitrocellulose, polyacrylamides, gabbros, magnetite, polymers, oligomers, non-repeating moieties, polyethylene glycol (PEG), monomethoxy-PEG, mono-(C₁-C₁₀)alkoxy-PEG, aryloxy-PEG, poly-(N-vinyl pyrrolidone)PEG, tresyl monomethoxy PEG, PEG propionaldehyde, bis-succinimidyl carbonate PEG, polystyrene bead crosslinked with divinylbenzene, propylene glycol homopolymers, a polypropylene oxide/ethylene oxide co-polymer, polyoxyethylated polyols (e.g., glycerol), polyvinyl alcohol, dextran, aminodextran, carbohydrate-based polymers, cross-linked dextran beads, polysaccharide beads, polycarbamate beads, divinyl sulfone activated polysaccharide, polystyrene beads that have been functionalized with tosyl-activated esters, magnetic polystyrene beads functionalized with tosyl-activated esters, streptavidin beads, streptavidin-monomer coated beads, streptavidin-tetramer coated beads, Streptavidin Coated Compel Magnetic beads, avidin coated beads, dextramer coated beads, divinyl sulfone-activated dextran, Carboxylate-modified bead, amine-modified beads, antibody coated beads, cellulose beads, grafted co-poly beads, poly-acrylamide beads, dimethylacrylamide beads optionally crosslinked with N—N′-bis-acryloylethylenediamine, hollow fiber membranes, fluorescent beads, collagen-agarose beads, gelatin beads, collagen-gelatin beads, collagen-fibronectin-gelatin beads, collagen beads, chitosan beads, collagen-chitosan beads, protein-based beads, hydrogel beads, hemicellulose, alkyl cellulose, hydroxyalkyl cellulose, carboxymethylcellulose, sulfoethylcellulose, starch, xylan, amylopectine, chondroitin, hyarulonate, heparin, guar, xanthan, mannan, galactomannan, chitin and chitosan.

444. The composition according to claim 418, wherein the first multimerization domain comprises a dimerization domain.

445. The composition according to claim 418, wherein the first multimerization domain comprises a trimerization domain.

446. The composition according to claim 418, wherein the first multimerization domain comprises a tetramerization domain.

447. The composition according to claim 418, wherein the first multimerization domain comprises a pentamerization domain.

448. The composition according to claim 447, wherein the pentamerization domain comprises a coiled-coil polypeptide structure.

449. The composition according to claim 418, wherein the first multimerization domain comprises a hexamerization domain.

450. The composition according to claim 449, wherein the hexamerization domain comprises three IgG domains.

451. The composition according to claim 418, wherein the first multimerization domain comprises a polymer structure to which is attached one or more scaffolds.

452. The composition according to claim 451, wherein the polymer structure comprises a polysaccharide.

453. The composition according to claim 452, wherein the polysaccharide comprises one or more dextran moieties.

454. The composition according to claim 418, wherein the first multimerization domain comprises a polyamide and/or a polyethylene glycol and/or a polysaccharide and/or a sepharose.

455. The composition according to claim 418, wherein the first multimerization domain comprises a carboxy methyl dextran and/or a dextran polyaldehyde and/or a carboxymethyl dextran lactone and/or or a cyclodextrin.

456. The composition according to claim 418, wherein the MHC-peptide complex (a-b-P) is attached to the first multimerization domain comprising an avidin or streptavidin via a linkage comprising a biotin moiety.

457. The composition according to any of claims 418 to 456, wherein the MHC-peptide complex is linked to the first multimerization domain by a first linker moiety.

458. The composition according to claim 457, wherein the MHC-peptide complex is linked to the first multimerization domain by a covalent linker moiety.

459. The MHC multimer according to claims 457 and 458, wherein the association of the first multimerization domain and at least one MHC-peptide complexes is formed by a binding entity X attached to, or being part of, the first multimerization domain, and a binding entity Y attached to, or being part of at least one of the MHC-peptide complexes.

460. The MHC multimer according to claims 457 and 458, wherein the linker moiety linking the first multimerization domain and the MHC-peptide complex comprises the linker moiety XY, wherein the linker moiety XY results from a reaction of the moiety X comprising one or more reactive groups and the moiety Y comprising one or more reactive groups, wherein at least some of said reactive groups are capable of reacting with each other.

461. The composition according to claim 460, wherein the moiety X comprises a nucleophilic group.

462. The composition according to claim 461, wherein the nucleophilic group is selected from the group consisting of —NH₂, —OH, —SH, —NH—NH₂.

463. The composition according to claim 460, wherein the moiety Y comprises an electrophilic group.

464. The composition according to claim 463, wherein the electrophilic group is selected from the group consisting of CHO, COOH and CO.

465. The MHC multimer according to claims 457 and 458, wherein at least one of the reactive groups on one of the moieties X and Y comprises a radical capable of reacting with a reactive group forming part of the other moiety.

466. The MHC multimer according to claims 457 and 458, wherein X and Y comprises reactive groups natively associated with the first multimerization domain and/or the MHC-peptide complexes.

467. The MHC multimer according to claims 457 and 458, wherein X and Y comprises reactive groups not natively associated with the first multimerization domain and/or the MHC-peptide complex.

468. The MHC multimer according to claims 457 and 458, wherein the linker moiety forms a covalent link between the first multimerization domain and at least one of the MHC-peptide complexes.

469. The MHC multimer according to claims 457 and 458, wherein the reactive groups of MHC-peptide complexes include amino acid side chains selected from the group consisting of —NH₂, —OH, —SH, and —NH—

470. The MHC multimer according to claims 457 and 458, wherein the reactive groups of the first multimerization domain include hydroxyls of polysaccharides such as dextrans

471. The MHC multimer according to claims 457 and 458, wherein the reactive groups of the first multimerization domain selected from the group consisting of amino acid side chains comprising —NH₂, —OH, —SH, and —NH— of polypeptides

472. The MHC multimer according to claims 457 and 458, wherein one of the polypeptides of the MHC-peptide complex is linked by a protein fusion to the first multimerization domain

473. The MHC multimer according to claims 457 and 458, wherein one of the polypeptides of the MHC-peptide complex is linked by a protein fusion to the first multimerization domain, wherein an acyl group and an amino group react to form an amide bond

474. The composition according to claim 418, wherein one of the polypeptides of the MHC-peptide complex is linked by non-native reactive groups to the first multimerization domain.

475. The composition according to claim 418, wherein the reactive groups include reactive groups that are attached to the first multimerization domain through association of a linker molecule comprising the reactive group.

476. The composition according to claim 418, wherein the reactive groups include reactive groups that are attached to the MHC-peptide complex through association of a linker molecule comprising the reactive group.

477. The composition according to claim 434, wherein dextran is activated by reaction of the dextran hydroxyls with divinyl sulfon

478. The composition according to claim 477, wherein dextran is activated by a multistep reaction that results in the decoration of the dextran with maleimide groups.

479. The composition according to claim 418, wherein the first multimerization domain comprises one or more nucleophilic groups

480. The composition according to claim 479, wherein the nucleophilic group is selected from the group consisting of —NH₂, —OH, —SH, —CN, —NH—NH₂

481. The composition according to claim 418, wherein the first multimerization domain is selected from the group consisting of polysaccharides, polypeptides comprising e.g. lysine, serine, and cysteine.

482. The composition according to claim 418, wherein the first multimerization domain comprises one or more electrophilic groups.

483. The composition according to claim 482, wherein the electrophilic group is selected from the group consisting of —COOH, —CHO, —CO, NHS-ester, tosyl-activated ester, and other activated esters, acid-anhydrides.

484. The composition according to claim 418, wherein the first multimerization domain is selected from the group consisting of polypeptides comprising e.g. glutamate and aspartate, or vinyl sulfone activated dextran.

485. The composition according to claim 418, wherein the first multimerization domain comprises one or more radicals.

486. The composition according to claim 418, wherein the first multimerization domain comprises one or more conjugated double bonds.

487. The composition according to claim 418, wherein the first multimerization domain comprises one or more beads and one or more linker moieties.

488. The MHC multimer according to any of the claims 457 to 487, wherein the linker is a flexible linker.

489. The MHC multimer according to any of the claims 457 to 488, wherein the linker is a rigid linker.

490. The MHC multimer according to any of the claims 457 to 489, wherein the linker is a water-soluble linker.

491. The MHC multimer according to any of the claims 457 to 490, wherein the linker is a cleavable linker.

492. The composition according to claim 491, wherein the cleavable linker is selected from linkers depicted in (FIG. 2) in PCT/DK2008/050167.

493. The composition according to claim 491, wherein the cleavable linker is cleavable at physiological conditions

494. The MHC multimer according to claim 457 or 458, wherein the MHC-peptide complex is linked to the first multimerization domain by a non-covalent linker moiety.

495. The composition according to claim 494, wherein the non-covalent linkage comprises natural dimerization

496. The composition according to claim 495, wherein the natural dimerization comprises antigen-antibody pairs

497. The composition according to claim 495, wherein the natural dimerization comprises DNA-DNA interactions

498. The composition according to claim 494, wherein the non-covalent linkage comprises natural interactions

499. The composition according to claim 498, wherein the natural interaction comprises biotin and streptavidin

500. The composition according to claim 442, wherein the bead is coated with streptavidin monomers, which in turn are associated with biotinylated MHC complexes

501. The composition according to claim 442, wherein the bead is coated with streptavidin tetramers, each of which being independently associated with 0, 1, 2, 3, or 4 biotinylated MHC complexes

502. The composition according to claim 442, wherein the bead is coated with a polysaccharide, such as a polysaccharide comprising dextran moieties.

503. The composition according to claim 498, wherein the natural interaction comprises the interaction of MHC complexes (comprising full-length polypeptide chains, including the transmembrane portion) with the cell membrane of for example dendritic cells

504. The composition according to claim 498, wherein the non-covalent linkage comprises artificial interactions

505. The composition according to claim 504, wherein the artificial interaction comprises His₆ tag interacting with Ni-NTA

506. The composition according to claim 504, wherein the artificial interaction comprises PNA-PNA

507. The composition according to claim 498, wherein the non-covalent linkage comprises non-specific adsorption

508. The composition according to claim 507, wherein the non-specific adsorption comprises adsorption of proteins onto surfaces

509. The composition according to claim 498, wherein the non-covalent linkage comprises the pentamer structure

510. The composition according to claim 498, wherein the non-covalent linkage comprises interactions selected from the group streptavidin/biotin, avidin/biotin, antibody/antigen, DNA/DNA, DNA/PNA, DNA/RNA, PNA/PNA, LNA/DNA, leucine zipper e.g. Fos/Jun, IgG dimeric protein, IgM multivalent protein, acid/base coiled-coil helices, chelate/metal ion-bound chelate, streptavidin (SA) and avidin and derivatives thereof, biotin, immunoglobulins, antibodies (monoclonal, polyclonal, and recombinant), antibody fragments and derivatives thereof, leucine zipper domain of AP-1 (jun and fos), hexa-his (metal chelate moiety), hexa-hat GST (glutathione S-transferase) glutathione affinity, Calmodulin-binding peptide (CBP), Strep-tag, Cellulose Binding Domain, Maltose Binding Protein, S-Peptide Tag, Chitin Binding Tag, Immuno-reactive Epitopes, Epitope Tags, E2Tag, HA Epitope Tag, Myc Epitope, FLAG Epitope, AU1 and AU5 Epitopes, Glu-Glu Epitope, KT3 Epitope, IRS Epitope, Btag Epitope, Protein Kinase-C Epitope, VSV Epitope, lectins that mediate binding to a diversity of compounds, including carbohydrates, lipids and proteins, e.g. Con A (Canavalia ensiformis) or WGA (wheat germ agglutinin) and tetranectin or Protein A or G (antibody affinity).

511. The composition according to claim 418, wherein the association is a covalent linkage so that one or more of the n MHC-peptide complexes is covalently linked to the second multimerization domains.

512. The composition according to claim 418, wherein the association is a non-covalent association so that one or more of the n MHC-peptide complexes is non-covalently associated with the second multimerization domain.

513. The composition according to claim 418, wherein the second multimerization domain comprises one or more scaffolds.

514. The composition according to claim 418, wherein the second multimerization domain comprises one or more carriers.

515. The composition according to claim 418, wherein the second multimerization domain comprises at least one scaffold and at least one carrier.

516. The composition according to claim 418, wherein the second multimerization domain comprises one or more optionally substituted organic molecules.

517. The composition according to claim 516, wherein the optionally substituted organic molecule comprises one or more functionalized cyclic structures.

518. The composition according to claim 517, wherein the one or more functionalized cyclic structures comprises one or more benzene rings.

519. The composition according to claim 516, wherein the optionally substituted organic molecule comprises a scaffold molecule comprising at least three reactive groups, or at least three sites suitable for non-covalent attachment.

520. The composition according to claim 418, wherein the second multimerization domain comprises one or more biological cells, such as antigen presenting cells or dendritic cells.

521. The composition according to claim 418, wherein the second multimerization domain comprises one or more membranes.

522. The composition according to claim 521, wherein the one or more membranes comprises liposomes or micelles.

523. The composition according to claim 418, wherein the second multimerization domain comprises one or more polymers.

524. The composition according to claim 523, wherein the one or more polymers are selected from the group consisting of the group consisting of polysaccharides.

525. The composition according to claim 524, wherein the polysaccharide comprises one or more dextran moieties.

526. The composition according to claim 418, wherein the second multimerization domain comprises one or more entities selected from the group consisting of an IgG domain, a coiled-coil polypeptide structure, a DNA duplex, a nucleic acid duplex, PNA-PNA, PNA-DNA, DNA-RNA.

527. The composition according to claim 418, wherein the second multimerization domain comprises an avidin, such as streptavidin.

528. The composition according to claim 418, wherein the second multimerization domain comprises an antibody.

529. The composition according to claim 528, wherein the antibody is selected from the group consisting of polyclonal antibody, monoclonal antibody, IgA, IgG, IgM, IgD, IgE, IgG1, IgG2, IgG3, IgG4, IgA1, IgA2, IgM1, IgM2, humanized antibody, humanized monoclonal antibody, chimeric antibody, mouse antibody, rat antibody, rabbit antibody, human antibody, camel antibody, sheep antibody, engineered human antibody, epitope-focused antibody, agonist antibody, antagonist antibody, neutralizing antibody, naturally-occurring antibody, isolated antibody, monovalent antibody, bispecific antibody, trispecific antibody, multispecific antibody, heteroconjugate antibody, immunoconjugates, immunoliposomes, labeled antibody, antibody fragment, domain antibody, nanobody, minibody, maxibody, diabody, fusion antibody.

530. The composition according to claim 418, wherein the second multimerization domain comprises one or more small organic scaffold molecules.

531. The composition according to claim 418, wherein the second multimerization comprises one or more further polypeptides in addition to a and b.

532. The composition according to claim 418, wherein the second multimerization comprises one or more protein complexes.

533. The composition according to claim 418, wherein the second multimerization comprises one or more beads

534. The composition according to claim 418, wherein the second multimerization domain comprises one or more compounds selected from the group consisting of agarose, sepharose, resin beads, glass beads, pore-glass beads, glass particles coated with a hydrophobic polymer, chitosan-coated beads, SH beads, latex beads, spherical latex beads, allele-type beads, SPA bead, PEG-based resins, PEG-coated bead, PEG-encapsulated bead, polystyrene beads, magnetic polystyrene beads, glutathione agarose beads, magnetic bead, paramagnetic beads, protein A and/or protein G sepharose beads, activated carboxylic acid bead, macroscopic beads, microscopic beads, insoluble resin beads, silica-based resins, cellulosic resins, cross-linked agarose beads, polystyrene beads, cross-linked polyacrylamide resins, beads with iron cores, metal beads, dynabeads, Polymethylmethacrylate beads activated with NHS, streptavidin-agarose beads, polypropylene, polyethylene, dextran, nylon, amylases, natural and modified celluloses, nitrocellulose, polyacrylamides, gabbros, magnetite, polymers, oligomers, non-repeating moieties, polyethylene glycol (PEG), monomethoxy-PEG, mono-(C₁-C₁₀)alkoxy-PEG, aryloxy-PEG, poly-(N-vinyl pyrrolidone)PEG, tresyl monomethoxy PEG, PEG propionaldehyde, bis-succinimidyl carbonate PEG, polystyrene bead crosslinked with divinylbenzene, propylene glycol homopolymers, a polypropylene oxide/ethylene oxide co-polymer, polyoxyethylated polyols (e.g., glycerol), polyvinyl alcohol, dextran, aminodextran, carbohydrate-based polymers, cross-linked dextran beads, polysaccharide beads, polycarbamate beads, divinyl sulfone activated polysaccharide, polystyrene beads that have been functionalized with tosyl-activated esters, magnetic polystyrene beads functionalized with tosyl-activated esters, streptavidin beads, streptavidin-monomer coated beads, streptavidin-tetramer coated beads, Streptavidin Coated Compel Magnetic beads, avidin coated beads, dextramer coated beads, divinyl sulfone-activated dextran, Carboxylate-modified bead, amine-modified beads, antibody coated beads, cellulose beads, grafted co-poly beads, poly-acrylamide beads, dimethylacrylamide beads optionally crosslinked with N—N′-bis-acryloylethylenediamine, hollow fiber membranes, fluorescent beads, collagen-agarose beads, gelatin beads, collagen-gelatin beads, collagen-fibronectin-gelatin beads, collagen beads, chitosan beads, collagen-chitosan beads, protein-based beads, hydrogel beads, hemicellulose, alkyl cellulose, hydroxyalkyl cellulose, carboxymethylcellulose, sulfoethylcellulose, starch, xylan, amylopectine, chondroitin, hyarulonate, heparin, guar, xanthan, mannan, galactomannan, chitin and chitosan.

535. The composition according to claim 418, wherein the second multimerization domain comprises a dimerization domain.

536. The composition according to claim 418, wherein the second multimerization domain comprises a trimerization domain.

537. The composition according to claim 418, wherein the second multimerization domain comprises a tetramerization domain.

538. The composition according to claim 418, wherein the second multimerization domain comprises a pentamerization domain.

539. The composition according to claim 538, wherein the pentamerization domain comprises a coiled-coil polypeptide structure.

540. The composition according to claim 418, wherein the second multimerization domain comprises a hexamerization domain.

541. The composition according to claim 540, wherein the hexamerization domain comprises three IgG domains.

542. The composition according to claim 418, wherein the second multimerization domain comprises a polymer structure to which is attached one or more scaffolds.

543. The composition according to claim 542, wherein the polymer structure comprises a polysaccharide.

544. The composition according to claim 543, wherein the polysaccharide comprises one or more dextran moieties.

545. The composition according to claim 418, wherein the second multimerization domain comprises a polyamide and/or a polyethylene glycol and/or a polysaccharide and/or a sepharose.

546. The composition according to claim 418, wherein the second multimerization domain comprises a carboxy methyl dextran and/or a dextran polyaldehyde and/or a carboxymethyl dextran lactone and/or a cyclodextrin.

547. The composition according to claim 418, wherein the MHC-peptide complex (a-b-P) is attached to the second multimerization domain comprising an avidin or streptavidin via a linkage comprising a biotin moiety.

548. The composition according to any of claims 418 to 547, wherein the MHC-peptide complex is linked to the second multimerization domain by a second linker moiety.

549. The composition according to claim 548, wherein the MHC-peptide complex is linked to the second multimerization domain by a covalent linker moiety.

550. The MHC multimer according to claims 547 and 548, wherein the linkage of the second multimerization domain and at least one MHC-peptide complexes is formed by a binding entity X attached to, or being part of, the second multimerization domain, and a binding entity Y attached to, or being part of at least one of the MHC-peptide complexes.

551. The MHC multimer according to claims 547 and 548, wherein the linker moiety linking the second multimerization domain and the MHC-peptide complex comprises the linker moiety XY, wherein the linker moiety XY results from a reaction of the moiety X comprising one or more reactive groups and the moiety Y comprising one or more reactive groups, wherein at least some of said reactive groups are capable of reacting with each other.

552. The composition according to claim 551, wherein the moiety X comprises a nucleophilic group.

553. The composition according to claim 552, wherein the nucleophilic group is selected from the group consisting of —NH₂, —OH, —SH, —NH—NH₂.

554. The composition according to claim 551, wherein the moiety Y comprises an electrophilic group.

555. The composition according to claim 554, wherein the electrophilic group is selected from the group consisting of CHO, COOH and CO.

556. The MHC multimer according to claims 547 and 548, wherein at least one of the reactive groups on one of the moieties X and Y comprises a radical capable of reacting with a reactive group forming part of the other moiety.

557. The MHC multimer according to claims 547 and 548, wherein X and Y comprises reactive groups natively associated with the second multimerization domain and/or the MHC-peptide complexes.

558. The MHC multimer according to claims 547 and 548, wherein X and Y comprises reactive groups not natively associated with the second multimerization domain and/or the MHC-peptide complex.

559. The MHC multimer according to claims 547 and 548, wherein the linker moiety forms a covalent link between the second multimerization domain and at least one of the MHC-peptide complexes.

560. The MHC multimer according to claims 547 and 548, wherein the reactive groups of MHC-peptide complexes include amino acid side chains selected from the group consisting of —NH₂, —OH, —SH, and —NH—

561. The MHC multimer according to claims 547 and 548, wherein the reactive groups of the second multimerization domain include hydroxyls of polysaccharides such as dextrans

562. The MHC multimer according to claims 547 and 548, wherein the reactive groups of the second multimerization domain selected from the group consisting of amino acid side chains comprising —NH₂, —OH, —SH, and —NH— of polypeptides

563. The MHC multimer according to claims 547 and 548, wherein one of the polypeptides of the MHC-peptide complex is linked by a protein fusion to the second multimerization domain

564. The MHC multimer according to claims 547 and 548, wherein one of the polypeptides of the MHC-peptide complex is linked by a protein fusion to the second multimerization domain, wherein an acyl group and an amino group react to form an amide bond

565. The composition according to claim 418, wherein one of the polypeptides of the MHC-peptide complex is linked by non-native reactive groups to the second multimerization domain.

566. The composition according to claim 418, wherein the reactive groups include reactive groups that are attached to the second multimerization domain through association of a linker molecule comprising the reactive group.

567. The composition according to claim 418, wherein the reactive groups include reactive groups that are attached to the MHC-peptide complex through association of a linker molecule comprising the reactive group.

568. The composition according to claim 434, wherein dextran is activated by reaction of the dextran hydroxyls with divinyl sulfon

569. The composition according to claim 568, wherein dextran is activated by a multistep reaction that results in the decoration of the dextran with maleimide groups.

570. The composition according to claim 418, wherein the second multimerization domain comprises one or more nucleophilic groups

571. The composition according to claim 570, wherein the nucleophilic group is selected from the group consisting of —NH₂, —OH, —SH, —CN, —NH—NH₂

572. The composition according to claim 418, wherein the second multimerization domain is selected from the group consisting of polysaccharides, polypeptides comprising e.g. lysine, serine, and cysteine.

573. The composition according to claim 418, wherein the second multimerization domain comprises one or more electrophilic groups.

574. The composition according to claim 573, wherein the electrophilic group is selected from the group consisting of —COOH, —CHO, —CO, NHS-ester, tosyl-activated ester, and other activated esters, acid-anhydrides.

575. The composition according to claim 418, wherein the second multimerization domain is selected from the group consisting of polypeptides comprising e.g. glutamate and aspartate, or vinyl sulfone activated dextran.

576. The composition according to claim 418, wherein the second multimerization domain comprises one or more radicals.

577. The composition according to claim 418, wherein the second multimerization domain comprises one or more conjugated double bonds.

578. The composition according to claim 418, wherein the second multimerization domain comprises one or more beads and one or more linker moieties.

579. The composition according to any of the claims 547 to 578, wherein the linker is a flexible linker.

580. The composition according to any of the claims 547 to 578, wherein the linker is a rigid linker.

581. The composition according to any of the claims 547 to 578, wherein the linker is a water-soluble linker.

582. The composition according to any of the claims 547 to 578, wherein the linker is a cleavable linker.

583. The composition according to claim 582, wherein the cleavable linker is selected from linkers depicted in (FIG. 2) in PCT/DK2008/050167.

584. The composition according to claim 582, wherein the cleavable linker is cleavable at physiological conditions

585. The composition according to any of the claims 547 to 578, wherein the MHC-peptide complex is linked to the second multimerization domain by a non-covalent linker moiety.

586. The composition according to claim 585, wherein the non-covalent linkage comprises natural dimerization.

587. The composition according to claim 586, wherein the natural dimerization comprises antigen-antibody pairs.

588. The composition according to claim 586, wherein the natural dimerization comprises DNA-DNA interactions.

589. The composition according to claim 585, wherein the non-covalent linkage comprises natural interactions.

590. The composition according to claim 589, wherein the natural interaction comprises biotin and streptavidin.

591. The composition according to claim 533, wherein the bead is coated with streptavidin monomers, which in turn are associated with biotinylated MHC complexes.

592. The composition according to claim 533, wherein the bead is coated with streptavidin tetramers, which in turn are associated with 0, 1, 2, 3, or 4 biotinylated MHC complexes.

593. The composition according to claim 533, wherein the bead is coated with a polysaccharide, such as a polysaccharide comprising a dextran moiety.

594. The composition according to claim 589, wherein the natural interaction comprises the interaction of MHC complexes (comprising full-length polypeptide chains, including the transmembrane portion) with the cell membrane of for example dendritic cells.

595. The composition according to claim 585, wherein the non-covalent linkage comprises artificial interactions.

596. The composition according to claim 595, wherein the artificial interaction comprises His₆ tag interacting with Ni-NTA.

597. The composition according to claim 595, wherein the artificial interaction comprises PNA-PNA.

598. The composition according to claim 585, wherein the non-covalent linkage comprises non-specific adsorption.

599. The composition according to claim 598, wherein the non-specific adsorption comprises adsorption of proteins onto surfaces.

600. The composition according to claim 585, wherein the non-covalent linkage comprises the pentamer structure.

601. The composition according to claim 585, wherein the non-covalent linkage comprises interactions selected from the group streptavidin/biotin, avidin/biotin, antibody/antigen, DNA/DNA, DNA/PNA, DNA/RNA, PNA/PNA, LNA/DNA, leucine zipper e.g. Fos/Jun, IgG dimeric protein, IgM multivalent protein, acid/base coiled-coil helices, chelate/metal ion-bound chelate, streptavidin (SA) and avidin and derivatives thereof, biotin, immunoglobulins, antibodies (monoclonal, polyclonal, and recombinant), antibody fragments and derivatives thereof, leucine zipper domain of AP-1 (jun and fos), hexa-his (metal chelate moiety), hexa-hat GST (glutathione S-transferase) glutathione affinity, Calmodulin-binding peptide (CBP), Strep-tag, Cellulose Binding Domain, Maltose Binding Protein, S-Peptide Tag, Chitin Binding Tag, Immuno-reactive Epitopes, Epitope Tags, E2Tag, HA Epitope Tag, Myc Epitope, FLAG Epitope, AU1 and AU5 Epitopes, Glu-Glu Epitope, KT3 Epitope, IRS Epitope, Btag Epitope, Protein Kinase-C Epitope, VSV Epitope, lectins that mediate binding to a diversity of compounds, including carbohydrates, lipids and proteins, e.g. Con A (Canavalia ensiformis) or WGA (wheat germ agglutinin) and tetranectin or Protein A or G (antibody affinity).

602. The composition according to any of claims 35-601, wherein the one or more biologically active molecules comprises one or more proteins.

603. The composition according to any of claims 35-602, wherein the one or more biologically active molecules comprises one or more proteins that are full length and/or truncated.

604. The composition according to any of claims 35-603, wherein the one or more biologically active molecules comprises one or more proteins that are modified e.g. by introduction of additional amino acids, mutated, chemically modified (e.g. acetylation, methylation, Pegylation, phosphorylation, glycosylation etc.) or carrying other modifications.

605. The composition according to any of claims 35-604, wherein the one or more biologically active molecules comprises one or more proteins that are stabilized by covalent or non-covalent attachment of protein linkers or other protein molecules.

606. The composition according to any of claims 35-605, wherein the one or more biologically active molecules comprises one or more enzymes.

607. The composition according to any of claims 35-606, wherein the one or more biologically active molecules comprises one or more Receptor proteins and/or co-receptor proteins.

608. The composition according to any of claims 35-607, wherein the one or more biologically active molecules comprises one or more Immunological proteins.

609. The composition according to any of claims 35-608, wherein the one or more biologically active molecules comprises one or more Growth factors (proteins capable of stimulating cellular proliferation and differentiation).

610. The composition according to any of claims 35-609, wherein the one or more biologically active molecules comprises one or more Protein hormones.

611. The composition according to any of claims 35-610, wherein the one or more biologically active molecules comprises one or more Proteins from microorganisms.

612. The composition according to any of claims 35-611, wherein the one or more biologically active molecules comprises one or more Proteins from microorganisms selected from the group consisting of surface proteins, intracellular proteins, secreted proteins (e.g. toxins), unmodified secreted proteins, modified secreted proteins (e.g. toxoid), chemically modified secreted proteins, physically and modified secreted proteins.

613. The composition according to any of claims 35-612, wherein the one or more biologically active molecules comprises one or more Nucleic acids.

614. The composition according to any of claims 35-613, wherein the one or more biologically active molecules comprises one or more DNAs.

615. The composition according to any of claims 35-614, wherein the one or more biologically active molecules comprises one or more DNAs selected from the group consisting of DNA, DNA encoding protein, and structural and not protein encoding DNA.

616. The composition according to any of claims 35-615, wherein the one or more biologically active molecules comprises one or more RNA.

617. The composition according to any of claims 35-616, wherein the one or more biologically active molecules comprises RNA selected from the group consisting of ribosomal RNA, antisense RNA, silencing RNA (siRNA), and MicroRNA.

618. The composition according to any of claims 35-617, wherein the one or more biologically active molecules comprises one or more LNA.

619. The composition according to any of claims 35-618, wherein the one or more biologically active molecules comprises one or more PNA.

620. The composition according to any of claims 35-619, wherein the one or more biologically active molecules comprises one or more Carbohydrates.

621. The composition according to any of claims 35-620, wherein the one or more biologically active molecules comprises one or more Saccharides and/or derivatives thereof, e.g. phosphorylated, oxidized, reduced, amino derivatives, acetylated etc. (the Saccharides may have more than one modification)

622. The composition according to any of claims 35-621, wherein the one or more biologically active molecules comprises one or more saccharides selected from the group consisting of Monosaccharides, Disaccharides, Polysaccharides, Homopolysaccharides (e.g. glycans, dextran), Polymers of repeating disaccharide units in which one of the sugars are is either N-acetylgalactosamine or N-acetylglucosamine (e.g. Glucosaminoglycans), Polysaccharide-peptide polymer (Peptidoglycan (bacterial cell wall)), Proteins carrying covalent attached oligosaccharides or polysaccharides (Glycoprotein's), and Lipids carrying covalent attached oligo- or polysaccharides (Glycolipids).

623. The composition according to any of claims 35-622, wherein the one or more biologically active molecules comprises one or more lipids.

624. The composition according to any of claims 35-623, wherein the one or more biologically active molecules comprises one or more Fatty acyls (e.g. prostaglandins, leukotrienes etc.).

625. The composition according to any of claims 35-624, wherein the one or more biologically active molecules comprises one or more Glycerolipids (e.g. triglycerides).

626. The composition according to any of claims 35-625, wherein the one or more biologically active molecules comprises one or more Glycerophospholipids.

627. The composition according to any of claims 35-626, wherein the one or more biologically active molecules comprises one or more Sphingolipids.

628. The composition according to any of claims 35-627, wherein the one or more biologically active molecules comprises one or more Sterol lipids (eg. cholesterol, estrogen etc.).

629. The composition according to any of claims 35-628, wherein the one or more biologically active molecules comprises one or more Prenol lipids (eg vitamin E, K).

630. The composition according to any of claims 35-629, wherein the one or more biologically active molecules comprises one or more Polyketides (eg. erythromycin).

631. The composition according to any of claims 35-630, wherein the one or more biologically active molecules comprises one or more Small molecules.

632. The composition according to any of claims 35-631, wherein the one or more biologically active molecules comprises one or more Natural compounds.

633. The composition according to any of claims 35-632, wherein the one or more biologically active molecules comprises one or more natural compounds selected from the group consisting of Hormones, Lipid and phospholipid derived hormones, Steroids, Eicosanoids, Amine-derived hormones (derivatives of amino acids tyrosine and tryptophan (e.g. catecholamine, thyroxine) and Salts, e.g. comprising Ca++, Mg++.

634. The composition according to any of claims 35-633, wherein the one or more biologically active molecules comprises one or more Synthetic chemical compound.

635. The composition according to any of claims 35-634, wherein the one or more biologically active molecules comprises one or more synthetic chemical compounds selected from the group consisting of Benzodiazepines, Short peptides, Peptidomimetics and other chemical compounds.

636. The composition according to any of claims 35-635, wherein the one or more biologically active molecules comprises one or more Immunologically active molecules.

637. The composition according to any of claims 35-636, wherein the one or more biologically active molecules comprises one or more Immunologically active molecules comprising one or more MHC class 1 proteins including HLA-A, HLA-B, HLA-C alleles.

638. The composition according to any of claims 35-637, wherein the one or more biologically active molecules comprises one or more Immunologically active molecules comprising one or more MHC class 1 complete trimers).

639. The composition according to any of claims 35-638, wherein the one or more biologically active molecules comprises one or more Immunologically active molecules comprising one or more MHC class 1 Heavy chain(s).

640. The composition according to any of claims 35-639, wherein the one or more biologically active molecules comprises one or more Immunologically active molecules comprising one or more MHC class 1 Heavy chains combined with one or more beta2 microglobulin.

641. The composition according to any of claims 35-640, wherein the one or more biologically active molecules comprises one or more Immunologically active molecules comprising one or more MHC class 1 Heavy chains combined with one or more beta2 microglobulin and one or more antigenic peptide(s).

642. The composition according to any of claims 35-641, wherein the one or more biologically active molecules comprises one or more Immunologically active molecules comprising one or more MHC class 1 Heavy chain combined with one or more antigenic peptide(s).

643. The composition according to any of claims 35-642, wherein the one or more biologically active molecules comprises one or more Immunologically active molecules comprising one or more MHC class 1 Beta2microglobulin.

644. The composition according to any of claims 35-643, wherein the one or more biologically active molecules comprises one or more Immunologically active molecules comprising one or more MHC class 1-like molecules.

645. The composition according to any of claims 35-644, wherein the one or more biologically active molecules comprises one or more Immunologically active molecules comprising one or more MICA.

646. The composition according to any of claims 35-645, wherein the one or more biologically active molecules comprises one or more Immunologically active molecules comprising one or more MICB.

647. The composition according to any of claims 35-646, wherein the one or more biologically active molecules comprises one or more Immunologically active molecules comprising one or more CD1d.

648. The composition according to any of claims 35-647, wherein the one or more biologically active molecules comprises one or more Immunologically active molecules comprising one or more molecules selected from the group consisting of HLA-E, HLA-F, HLA-G, and HLA-H.

649. The composition according to any of claims 35-648, wherein the one or more biologically active molecules comprises one or more Immunologically active molecules comprising one or more molecules selected from the group consisting of ULBP-1, ULBP-2, and ULBP-3.

650. The composition according to any of claims 35-649, wherein the one or more biologically active molecules comprises one or more MHC 2 proteins.

651. The composition according to any of claims 35-650, wherein the one or more biologically active molecules comprises one or more Immunologically active molecules comprising one or more molecules selected from the group consisting of MHC 2 HLA-DR (HLA-DRA, HLA-DRB1, HLA-DRB3, HLA-DRB4, HLA-DRB5), HLA-DQ (HLA-DQA1, HLADQA2, HLA-DQB1, HLA-DQB2), HLA-DP (HLA-DPA1, HLA-DPB1), HLA-DO (HLA-DOA, HLA-DOB), and HLA-DM (HLA-DMA, HLA-DMB).

652. The composition according to any of claims 35-651, wherein the one or more biologically active molecules comprises one or more Immunologically active molecules comprising one or more MHC 2 complete trimer molecule(s).

653. The composition according to any of claims 35-652, wherein the one or more biologically active molecules comprises one or more Immunologically active molecules comprising one or more MHC 2 1 α-heavy chain(s).

654. The composition according to any of claims 35-653, wherein the one or more biologically active molecules comprises one or more Immunologically active molecules comprising one or more MHC 2 1 β-heavy chain(s).

655. The composition according to any of claims 35-654, wherein the one or more biologically active molecules comprises one or more Immunologically active molecules comprising one or more MHC 2 1 α-heavy chain(s) and one or more 1 β-heavy chain(s).

656. The composition according to any of claims 35-655, wherein the one or more biologically active molecules comprises one or more Immunologically active molecules comprising one or more MHC 2 1 α-heavy chain(s) and one or morel β-heavy chain(s) and one or more antigenic peptide(s).

657. The composition according to any of claims 35-656, wherein the one or more biologically active molecules comprises one or more Immunologically active molecules comprising one or more Cytokines.

658. The composition according to any of claims 35-657, wherein the one or more biologically active molecules comprises one or more Immunologically active molecules comprising one or more Interferons such as IFN-alpha, IFN-beta, and IFN-gamma.

659. The composition according to any of claims 35-658, wherein the one or more biologically active molecules comprises one or more Immunologically active molecules comprising one or more Interleukines such as IL-1, IL-2, IL-3, IL-4, IL-6, IL-7, IL-8, IL-10, IL-11, IL-12, IL-15, IL-16, IL-17, IL-18, IL-19, IL-20, IL-21, IL-22, IL-23, IL-24, IL-25, IL-26, IL-27, IL-28, —IL-29, IL-30, IL-31, IL-32, IL-33, IL-34, and IL-35.

660. The composition according to any of claims 35-659, wherein the one or more biologically active molecules comprises one or more Immunologically active molecules comprising one or more Tumor necrosis factors such as TNF-alfa, and TNF-beta.

661. The composition according to any of claims 35-660, wherein the one or more biologically active molecules comprises one or more Immunologically active molecules comprising one or more molecules selected from the group consisting of CSFs (colony-stimulating factors), c-Kit, EPO, TGF-13, CD40L, CD27L, CD30L, and MIF.

662. The composition according to any of claims 35-661, wherein the one or more biologically active molecules comprises one or more Immunologically active molecules comprising one or more Cytokine receptors such as IL-1R, IL-2R, IL-3R, IL-4R, IL-5R, IL-6R, IL-7R, IL-8R, IL-9-R, IL-10R, IL-11R, IL-12R, IL-13R, IL-15R, IL-18R, IL-20R, IL-21R, IL-22R, IL-23R, IL-27R, and IL-28R.

663. The composition according to any of claims 35-662, wherein the one or more biologically active molecules comprises one or more Immunologically active molecules comprising one or more Chemokines such as CXCL1, CXCL2, CXCL3, CXCL4, CXCL5, CXCL6, CXCL7, CXCL8, CXCL9, CXCL10, CXCL11, CXCL12, CXCL13, CXCL14, CXCL15, CXCL16, CCL1, CCL2, CCL3, CCL4, CCL5, CCL6, CCL7, CCL8, CCL8, CCL9, CCL10, CCL11, CCL12, CCL13, CCL14, CCL15, CCL16, CCL17, CCL18, CCL19, CCL20, CCL21, CCL22, CCL23, CCL24, CCL25, CCL26, CCL27, CCL28, CXCR4, and CCRL2.

664. The composition according to any of claims 35-663, wherein the one or more biologically active molecules comprises one or more Immunologically active molecules comprising one or more Chemokine receptors such as CCR1, CCR2, CCR3, CCR4, CCR5, CCR6, CCR7, CCR8, CCR9, CCR10, CCR11, CXCR1, CXCR2, CXCR3, CXCR4, CXCR5, CXCR6, CXCR7, and CX3CR1.

665. The composition according to any of claims 35-664, wherein the one or more biologically active molecules comprises one or more Immunologically active molecules comprising one or more Toll-like receptors such as TLR1, TLR2, TLR3, TLR4, TLR5, TLR6, TLR7, TLR8, TLR9, and TLR10.

666. The composition according to any of claims 35-665, wherein the one or more biologically active molecules comprises one or more Immunologically active molecules comprising one or more Toll like receptor ligands such as multiple triacyl lipopeptides, multiple diacyl lipopeptides, multiple glycolipids, multiple lipopeptides, multiple lipoproteins, lipoteichoic acid, peptidoglycans, Zymosan, single- and double-stranded RNA, Poly I:C, lipo-polysaccharides, fibrinogen, heparin sulphate fragments, hyaluronic acid fragments, flagellin, imidazoquinoline, loxoribine (guanosine analogue), bropirimine, Imiquimod, unmethylated CpG DNA; Viral entry receptors/molecules such as Ku70, Pvr, Prr1, HVEM, EphrinB2, cellular integrins (in particular alpha2beta1, alpha6beta1 alphaVbeta3), CD81, CD155, SR-B1, claudin-1, xCT, human nectin-2, LIGHT, TLR3, LIR, Heparan sulphate proteoglycans, GPI anchored proteins, and hemeagglutinin receptor.

667. The composition according to any of claims 35-666, wherein the one or more biologically active molecules comprises one or more Immunologically active molecules comprising one or more Heat shock proteins such as HSP70, and HSP90.

668. The composition according to any of claims 35-667, wherein the one or more biologically active molecules comprises one or more Immunologically active molecules comprising one or more Bacterial entry receptors/molecules such as CD48, CEACAM-1, -2, -3, -4, -5, -6, invasion, internalin (InIA), and InIB.

669. The composition according to any of claims 35-668, wherein the one or more biologically active molecules comprises one or more Immunologically active molecules comprising one or more Fc receptors like ε (FcεRI, FcεRII)—γ (FcγRI, FcγRII, FcγRIII)—α/μ (FcαRI, Fcα/μR)—Neonatal FcR.

670. The composition according to any of claims 35-669, wherein the one or more biologically active molecules comprises one or more Immunologically active molecules comprising one or more Lymphocyte homing receptors such as CD44, L-selectin, VLA-4 (CD49a, b, c, d, e, f), and LFA-1.

671. The composition according to any of claims 35-670, wherein the one or more biologically active molecules comprises one or more Immunologically active molecules comprising one or more Co-stimulatory molecules such as CD2, CD3, CD4, CD5, CD8, CD9, CD27, CD28, CD30, CD69, CD134 (OX40), CD120, CD137 (4-1BB), CD147, CDw150 (SLAM), CD152 (CTLA-4), CD153 (CD30L), CD40L (CD154), NKG2D, ICOS, PD-1, Fas (CD95), FasL, CD40, CD58, CD70, CD72, B7.1 (CD80), B7.2 (CD86), B7RP-1, B7-H3, PD-L1, PD-L2, CD134L, CD137L, and ICOSL.

672. The composition according to any of claims 35-671, wherein the one or more biologically active molecules comprises one or more Immunologically active molecules comprising one or more NK cell receptors/molecules such as CD16, NKp30, NKp44, NKp46, NKp80, 2B4, KIR3DL1, KIR3DL″, KIR3DS1, KIR2DL1, KIRDL2, KIR2DL3, KIR2DL4, KIR2DL5, CD94/NKG2A, CD94/NKG2C, CD94/NKG2E, CD94/NKG2H, and NKG2ADNKG2D.

673. The composition according to any of claims 35-672, wherein the one or more biologically active molecules comprises one or more Immunologically active molecules comprising one or more Adhesion molecules such as ICAM-1, ICAM-2, GlyCAM-1, VCAM, and CD34.

674. The composition according to any of claims 35-673, wherein the one or more biologically active molecules comprises one or more Immunologically active molecules comprising one or more Anti microbial peptides such Defensins and cathelicidin derived peptide LL-37.

675. The composition according to any of claims 35-674, wherein the one or more biologically active molecules comprises one or more Immunologically active molecules comprising one or more Antibodies (e.g. monoclonal, polyclonal, recombinant) directed to a defined antigen e.g. any of the described biologically active molecules, immunologically active molecules, viral antigens, bacterial antigens, parasitic antigens, self-antigens, cancer antigens or any other antigen.

676. The composition according to any of claims 35-675, wherein the one or more biologically active molecules comprises one or more Immunologically active molecules comprising one or more full length antibodies.

677. The composition according to any of claims 35-676, wherein the one or more biologically active molecules comprises one or more Immunologically active molecules comprising one or more antibody derivatives.

678. The composition according to any of claims 35-677, wherein the one or more biologically active molecules comprises one or more Immunologically active molecules comprising one or more antibody Fab fragments.

679. The composition according to any of claims 35-678, wherein the one or more biologically active molecules comprises one or more Immunologically active molecules comprising one or more antibody scFv fragments.

680. The composition according to any of claims 35-679, wherein the one or more biologically active molecules comprises one or more Immunologically active molecules comprising one or more antibody-like structures e.g. scaffold proteins having the ability to bind antigens.

681. The composition according to any of claims 35-680, wherein the one or more biologically active molecules comprises one or more Immunologically active molecules comprising one or more Toxic molecules (e.g. toxins, and toxids).

682. The composition according to any of claims 35-681, wherein the one or more biologically active molecules comprises one or more Immunologically active molecules comprising one or more Enzymes.

683. The composition according to any of claims 35-682, wherein the one or more biologically active molecules comprises one or more Immunologically active molecules comprising one or more molecules selected from the group consisting of anti-LFA-1, anti-CD44, anti-beta7, anti-selectin L, anti-selectin E, and anti-selectin P, chemiluminescent substances, bioluminescent substances, polymers, metal particles, and haptens, such as cyclophosphamide, methotrexate, Azathioprine, mizoribine, 15-deoxyspergualin, neomycin, staurosporine, genestein, herbimycin A, Pseudomonas exotoxin A, saporin, Rituxan, Ricin, gemtuzumab ozogamicin, Shiga toxin, vitamin D3, IL-2 toxins, cyclosporin, FK-506, rapamycin, TGF-beta, clotrimazole, nitrendipine, and charybdotoxin, heavy'metals like inorganic and organic mercurials, and FN18-CRM9, radioisotopes such as incorporated isotopes of iodide, cobalt, selenium, tritium, and phosphor, and haptens such as DNP, and digoxiginin.

684. The composition according to any of the claims 1-683, wherein the one or more pharmamers comprises one or more multimerization domain(s).

685. The composition according to any of the claims 1-684, wherein the one or more pharmamers comprises more than 1 multimerization domain such as more than 2, 3, 4, 5, 6, 7, 8, 9, 10, 11, 12, 13, 14, 15, 16, 17, 18, 19, 20, 25, 30, 35, 40, 45, 50, 55, 60, 65, 70, 75, 80, 85, 90, 95, 100, 200, 300, 400, 500, 600, 700, 800, 900, 1,000, 2,000, 3,000, 4,000, 5,000, 6,000, 7,000, 8,000, 9,000, or more than 10,000 multimerization domains.

686. The composition according to any of the claims 1-685, wherein the one or more pharmamers comprises more than 1 different multimerization domain such as more than 2, 3, 4, 5, 6, 7, 8, 9, 10, 11, 12, 13, 14, 15, 16, 17, 18, 19, 20, 25, 30, 35, 40, 45, 50, 55, 60, 65, 70, 75, 80, 85, 90, 95, 100, 200, 300, 400, 500, 600, 700, 800, 900, 1,000, 2,000, 3,000, 4,000, 5,000, 6,000, 7,000, 8,000, 9,000, or more than 10,000 different multimerization domains.

687. The composition according to any of the claims 1-686, wherein the one or more pharmamers comprises more than 1 identical multimerization domain such as more than 2, 3, 4, 5, 6, 7, 8, 9, 10, 11, 12, 13, 14, 15, 16, 17, 18, 19, 20, 25, 30, 35, 40, 45, 50, 55, 60, 65, 70, 75, 80, 85, 90, 95, 100, 200, 300, 400, 500, 600, 700, 800, 900, 1,000, 2,000, 3,000, 4,000, 5,000, 6,000, 7,000, 8,000, 9,000, or more than 10,000 identical multimerization domains.

688. The composition according to any of claims 1-687, wherein one or more pharmamers comprises less than 10,000 multimerization domains, such as for example less than 9,000, 8,000, 7,000, 6,000, 5,000, 4,000, 3,000, 2,000, 1,000, 900, 800, 700, 600, 500, 400, 300, 200, 100, 95, 90, 85, 80, 75, 70, 65, 60, 55, 50, 45, 40, 35, 30, 25, 20, 15, 10, 9, 8, 7, 6, 5, 4, 3, or less than 2 multimerization domains.

689. The composition according to any of claims 1-688, wherein one or more pharmamers comprises less than 10,000 different multimerization domains, such as for example less than 9,000, 8,000, 7,000, 6,000, 5,000, 4,000, 3,000, 2,000, 1,000, 900, 800, 700, 600, 500, 400, 300, 200, 100, 95, 90, 85, 80, 75, 70, 65, 60, 55, 50, 45, 40, 35, 30, 25, 20, 15, 10, 9, 8, 7, 6, 5, 4, 3, or less than 2 different multimerization domains.

690. The composition according to any of claims 1-689, wherein one or more pharmamers comprises less than 10,000 identical multimerization domains, such as for example less than 9,000, 8,000, 7,000, 6,000, 5,000, 4,000, 3,000, 2,000, 1,000, 900, 800, 700, 600, 500, 400, 300, 200, 100, 95, 90, 85, 80, 75, 70, 65, 60, 55, 50, 45, 40, 35, 30, 25, 20, 15, 10, 9, 8, 7, 6, 5, 4, 3, or less than 2 identical multimerization domains.

691. The composition according to any of claims 684-690, wherein the one or more multimerization domains(s) comprises one or more soluble multimerization domain(s).

692. The composition according to any of claims 684-691, wherein the one or more multimerization domains(s) comprises one or more insoluble multimerization domain(s).

693. The composition according to any of claims 684-692, wherein the one or more multimerization domains(s) comprises one or more multimerization domains selected from the group consisting of polysaccharides, dextrans, carboxy methyl dextran, dextran polyaldehyde, carboxymethyl dextran lactone, and cyclodextrins, pullulans, schizophyllan, scleroglucan, xanthan, gellan, O-ethylamino guaran, chitins and chitosans including 6-O-carboxymethyl chitin and N-carboxymethyl chitosan, derivatised cellolosics including carboxymethyl cellulose, carboxymethyl hydroxyethyl cellulose, hydroxy-ethyl cellulose, 6-amino-6-deoxy cellulose and O-ethyl-amine cellulose, hydroxylated starch, hydroxypropyl starch, hydroxyethyl starch, carrageenans, alginates, and agarose, synthetic polysaccharides including ficoll and carboxy-methylated ficoll, vinyl polymers including poly(acrylic acid), poly(acryl amides), poly(acrylic esters), poly(2-hydroxy ethyl methacrylate), poly(methyl methacrylate), poly(maleic acid), poly(maleic anhydride), poly(acrylamide), poly(ethyl-co-vinyl acetate), poly(methacrylic acid), poly(vinyl-alcohol), poly(vinyl alcohol-co-vinyl chloroacetate), aminated poly(vinyl alcohol), and co block polymers thereof, poly ethylene glycol (PEG) or polypropylene glycol or poly(ethylene oxide-co-propylene oxides) comprising polymer backbones including linear, comb-shaped or StarBurst dendrimers, poly amino acids including polylysines, polyglutamic acid, polyurethanes, poly(ethylene imines), pluriol, proteins including peptides, polypeptides, antigenbinding peptides, albumins, immunoglobulins, coiled-coil helixes e.g. Fos-Jun or Fos-Jun like or coiled-coiled dimers/trimers/tetramers/pentamers, Streptavidin, Avidin, Streptactin, T-cell receptors other protein receptors and virus-like proteins (VLP), and polynucleotides, DNA, RNA, PNA, LNA, oligonucleotides and oligonucleotide dendrimer constructs and small organic molecules including but not limited to steroids, peptides, linear or cyclic structures, aromatic structures, aliphatic structures.

694. The composition according to any of claims 684-693, wherein the one or more multimerization domains(s) comprises cells e.g. dendritic cells, antigen presenting cell, B-cell, T-cell Macrophages, Kupfer cells, Langerhans cells, transfected cells expressing biologically active proteins, including hybridoma cells, yeast-cells, insect-cells, CHO cells, any cell biologically active molecules, cell-like structures e.g. micelles, liposomes, and phages e.g. filamentous phages and viral or viral-like particles.

695. The composition according to any of claims 684-694, wherein the one or more multimerization domains(s) comprises one or more solid supports including but not limited to beads, particulate matters and other surfaces.

696. The composition according to any of claims 684-695, wherein the one or more multimerization domains(s) comprises one or more self-assembling multimeric structures.

697. The composition according to any of claims 684-696, wherein the one or more multimerization domains(s) comprises mixed forms of multimerization domains such as e.g. dextran coupled with Streptavidin.

698. The composition according to any of claims 684-697, wherein the one or more multimerization domains(s) comprises one or more multimerisation domains made of Streptavidin or Avidin whereto biotin, biotin-like peptides or other biotin-like molecules can bind.

699. The composition according to any of claims 684-698, wherein the one or more multimerization domains(s) comprises dextran whereto biologically active molecules are attached directly through a linker.

700. The composition according to any of claims 684-699, wherein the one or more multimerization domains(s) comprises divinylsulfone activated dextran whereto biologically active molecules are coupled directly e.g. through —SH group(s) or amine(s) in the biologically active molecules, dextran coupled with SA whereto biologically active molecules are attached through a biotin on the biologically active molecule, dextran with biologically active molecules are attached through a coiled-coil structure where on α-helix of a coiled-coil dimer is coupled to dextran and the other α-helix is coupled to the biologically active molecule e.g. as a fusion protein.

701. The composition according to any of claims 684-700, wherein the one or more multimerization domains(s) comprises beads or bead-like structures having an excluded volume (e.g. polysaccharide beads, polystyrene beads, magnetic polystyrene beads, polycarbamate beads, or any other kind of beads that can be dissolved or suspended in aqueous buffer) that carry electrophilic groups (e.g. divinyl sulfone activated polysaccharide, polystyrene beads that have been functionalized with tosyl-activated esters, magnetic polystyrene beads functionalized with tosyl-activated esters), and where biologically active molecules have been covalently immobilized to these by reaction of nucleophiles comprised within the biologically active molecule with the electrophiles of the beads.

702. The composition according to any of claims 684-701, wherein the one or more multimerization domains(s) comprises one or more beads covalently or non-covalently coated with pharmamers or single biologically active molecules, through non-cleavable or cleavable linkers.

703. The composition according to any of claims 684-702, wherein the one or more multimerization domains(s) comprises one or more beads coated with streptavidin monomers, which in turn are associated with biotinylated pharmamers.

704. The composition according to any of claims 684-703, wherein the one or more multimerization domains(s) comprises one or more beads coated with streptavidin tetramers, each of which are associated with 0, 1, 2, 3, or 4 biotinylated biologically active molecules.

705. The composition according to any of claims 684-704, wherein the one or more multimerization domains(s) comprises one or more beads coated with biologically active molecules where e.g. the reactive groups of the biologically active molecules (e.g. the divinyl sulfone-activated dextran backbone) has reacted with nucleophilic groups on the bead, to form a covalent linkage between the dextran of the dextramer and the beads.

706. The composition according to any of claims 684-705, wherein the one or more multimerization domains(s) comprises one or more self-assembling multimeric structures such as trimeric, tetrameric, pentameric, hexameric or heptameric coiled-coil structures holding together 3, 4, 5, 6 or 7 biologically active molecules.

707. The composition according to any of claims 684-706, wherein the one or more multimerization domains(s) comprises several multimerization domains (e.g. streptavidin tetramers bound to biotinylated biologically active molecules) linked to another multimerization domain (e.g. the bead).

708. The composition according to any of claims 684-707, wherein the one or more multimerization domains(s) comprises any support capable of binding the biologically active molecules.

709. The composition according to any of claims 684-708, wherein the one or more multimerization domains(s) comprises glass, polystyrene, polypropylene, polyethylene, dextran, nylon, amylases, natural and modified celluloses, polyacrylamides, gabbros, and magnetite.

710. The composition according to any of claims 684-709, wherein the one or more multimerization domains(s) comprises one or more spherical supports such as one or more bead.

711. The composition according to any of claims 684-710, wherein the one or more multimerization domains(s) comprises one or more cylindrical supports such as the inside surface of a test tube, or the external surface of a rod.

712. The composition according to any of claims 684-711, wherein the one or more multimerization domains(s) comprises one or more flat supports such as a sheet, test strip, a membrane, or a plastic surface.

713. The composition according to any of claims 684-712, wherein the one or more multimerization domains(s) comprises one or more polymers, oligomers and/or non-repeating moieties.

714. The composition according to any of claims 684-713, wherein the one or more multimerization domains(s) comprises one or more polymers or oligomer moieties e.g. comprising repeat units consisting of a repeat moiety selected from alkyl (e.g., —CH₂—), substituted alkyl (e.g., —CHR—), alkenyl, substituted alkenyl, alkynyl, substituted alkynyl, phenyl, aryl, heterocyclic, amine, ether, sulfide, disulfide, hydrazine, and any of the foregoing substituted with oxygen, sulfur, sulfonyl, phosphonyl, hydroxyl, alkoxyl, amine, thiol, ether, carbonyl, carboxyl, ester, amide, alkyl, alkenyl, alkynyl, aryl, heterocyclic, as well as moieties comprising combinations thereof.

715. The composition according to any of claims 684-714, wherein the one or more multimerization domains(s) comprises one or more non-repeating multifunctional bridge moieties selected from alkyl, phenyl, aryl, alkenyl, alkynyl, heterocyclic, amine, ether, sulfide, disulfide, hydrazine, and any of the foregoing substituted with oxygen, sulfur, sulfonyl, phosphonyl, hydroxyl, alkoxyl, amine, thiol, ether, carbonyl, carboxyl, ester, amide, alkyl, alkenyl, alkynyl, aryl, heterocyclic, and moieties comprising combinations thereof.

716. The composition according to any of claims 684-715, wherein the one or more multimerization domains(s) comprises one or more oligomers (or oligomer moieties) or polymers (or polymer moieties), that are soluble or insoluble.

717. The composition according to any of claims 684-716, wherein the one or more multimerization domains(s) comprises one or more oligomers (or oligomer moieties) or polymers (or polymer moieties) comprising one or more cross-linked oligomer (or oligomer moieties) or cross-linked polymers (or polymer moieties).

718. The composition according to any of claims 684-717, wherein the one or more multimerization domains(s) comprises one or more oligomers (or oligomer moieties) or polymers (or polymer moieties) comprising one or more homopolymers and/or one or more copolymers (including polymers having two monomer-repeat-units, terpolymers and higher-order polymers), including for example random copolymer moieties and block copolymer moieties.

719. The composition according to any of claims 684-718, wherein the one or more multimerization domains(s) comprises one or more oligomers (or oligomer moieties) or polymers (or polymer moieties) comprising one or more ionic monomer moieties such as one or more anionic monomer moieties.

720. The composition according to any of claims 684-719, wherein the one or more multimerization domains(s) comprises one or more oligomers (or oligomer moieties) or polymers (or polymer moieties) comprising one or more hydrophobic and/or hydrophilic monomer moieties.

721. The composition according to any of claims 684-720, wherein the one or more multimerization domains(s) comprises from 1 to 100 coupling sites for biologically active molecules, such as from 1 to 5 coupling sites, for example from 5 to 10 coupling sites, such as from 10 to 15 coupling sites, for example from 15 to 20 coupling sites, such as from 20 to 25 coupling sites, for example from 25 to 30 coupling sites, such as from 30 to 35 coupling sites, for example from 35 to 40 coupling sites, such as from 40 to 45 coupling sites, for example from 45 to 50 coupling sites, such as from 50 to 55 coupling sites, for example from 55 to 60 coupling sites, such as from 60 to 65 coupling sites, for example from 65 to 70 coupling sites, such as from 70 to 75 coupling sites, for example from 75 to 80 coupling sites, such as from 80 to 85 coupling sites, for example from 85 to 90 coupling sites, such as from 90 to 95 coupling sites, for example from 95 to 100 coupling sites or, 1, 2, 3, 4, 5, 6, 7, 8, 9, or 10 coupling sites for biologically active molecules.

722. The composition according to any of claims 684-721, wherein the one or more multimerization domains(s) comprises one or more polymer moieties that are soluble or insoluble, exist as dispersed micelles or particles, such as colloidal particles or (insoluble) macroscopic beads.

723. The composition according to any of claims 684-722, wherein the one or more multimerization domains(s) comprises one or more polymer moieties that are hydrophobic, hydrophilic, amphiphilic, uncharged or non-ionic, negatively or positively charged, or a combination thereof, and can be organic or inorganic.

724. The composition according to any of claims 684-723, wherein the one or more multimerization domains(s) comprises one or more inorganic polymer moieties such as silica (e.g., multi-layered silica), diatomaceous earth, zeolite, calcium carbonate, talc, and the like.

725. The composition according to any of claims 684-724, wherein the one or more multimerization domains(s) comprises one or more water-soluble polymers including polyethylene glycol (PEG), monomethoxy-PEG, mono-(C₁-C₁₀)alkoxy-PEG, aryloxy-PEG, poly-(N-vinyl pyrrolidone)PEG, tresyl monomethoxy PEG, PEG propionaldehyde, bis-succinimidyl carbonate PEG, propylene glycol homopolymers, a polypropylene oxide/ethylene oxide co-polymer, polyoxyethylated polyols (e.g., glycerol), polyvinyl alcohol, dextran, cellulose, or other carbohydrate-based polymers.

726. The composition according to any of claims 684-725, wherein the one or more multimerization domains(s) comprises one or more polysaccharides such as materials from vegetal or animal origin, including cellulose materials, hemicellulose, alkyl cellulose, hydroxyalkyl cellulose, carboxymethylcellulose, sulfoethylcellulose, starch, xylan, amylopectine, chondroitin, hyarulonate, heparin, guar, xanthan, mannan, galactomannan, chitin, and/or chitosan.

727. The composition according to any of claims 684-726, wherein the one or more multimerization domains(s) comprises one or more multimerization domain selected from the group consisting of agarose, sepharose, resin beads, glass beads, pore-glass beads, glass particles coated with a hydrophobic polymer, chitosan-coated beads, SH beads, latex beads, spherical latex beads, allele-type beads, SPA bead, PEG-based resins, PEG-coated bead, PEG-encapsulated bead, polystyrene beads, magnetic polystyrene beads, glutathione agarose beads, magnetic bead, paramagnetic beads, protein A and/or protein G sepharose beads, activated carboxylic acid bead, macroscopic beads, microscopic beads, insoluble resin beads, silica-based resins, cellulosic resins, cross-linked agarose beads, polystyrene beads, cross-linked polyacrylamide resins, beads with iron cores, metal beads, dynabeads, Polymethylmethacrylate beads activated with NHS, streptavidin-agarose beads, polypropylene, polyethylene, dextran, nylon, amylases, natural and modified celluloses, nitrocellulose, polyacrylamides, gabbros, magnetite, polymers, oligomers, non-repeating moieties, polyethylene glycol (PEG), monomethoxy-PEG, mono-(C₁-C₁₀)alkoxy-PEG, aryloxy-PEG, poly-(N-vinyl pyrrolidone)PEG, tresyl monomethoxy PEG, PEG propionaldehyde, bis-succinimidyl carbonate PEG, polystyrene bead crosslinked with divinylbenzene, propylene glycol homopolymers, a polypropylene oxide/ethylene oxide co-polymer, polyoxyethylated polyols (e.g., glycerol), polyvinyl alcohol, dextran, aminodextran, carbohydrate-based polymers, cross-linked dextran beads, polysaccharide beads, polycarbamate beads, polyvinylcarbamate, divinyl sulfone activated polysaccharide, polystyrene beads that have been functionalized with tosyl-activated esters, magnetic polystyrene beads functionalized with tosyl-activated esters, streptavidin beads, streptavidin-monomer coated beads, streptavidin-tetramer coated beads, Streptavidin Coated Compel Magnetic beads, avidin coated beads, dextramer coated beads, divinyl sulfone-activated dextran, Carboxylate-modified bead, amine-modified beads, antibody coated beads, cellulose beads, grafted co-poly beads, poly-acrylamide beads, dimethylacrylamide beads optionally crosslinked with N—N′-bis-acryloylethylenediamine, hollow fiber membranes, fluorescent beads, collagen-agarose beads, gelatin beads, collagen-gelatin beads, collagen-fibronectin-gelatin beads, collagen beads, chitosan beads, collagen-chitosan beads, protein-based beads, hydrogel beads, hemicellulose, alkyl cellulose, hydroxyalkyl cellulose, carboxymethylcellulose, sulfoethylcellulose, starch, xylan, amylopectine, chondroitin, hyarulonate, heparin, guar, xanthan, mannan, galactomannan, chitin and chitosan.

728. The composition according to any of claims 684-727, wherein the one or more multimerization domains(s) comprises one or more multimerization domain(s) with a molecular weight of less than 1,000 Da (e.g. small molecule scaffold).

729. The composition according to any of claims 684-728, wherein the one or more multimerization domains(s) comprises one or more multimerization domain(s) with a molecular weight of between 1,000 Da and 10,000 Da (e.g. small molecule scaffold, small peptides, small polymers) such as from 1,000 Da to 2,000 Da, for example from 2,000 Da to 3,000 Da, such as from 3,000 Da to 4,000 Da, for example from 4,000 Da to 5,000 Da, such as from 5,000 Da to 6,000 Da, for example from 6,000 Da to 7,000 Da, such as from 7,000 Da to 8,000 Da, for example from 8,000 Da to 9,000 Da, such as from 9,000 Da to 10,000 Da.

730. The composition according to any of claims 684-729, wherein the one or more multimerization domains(s) comprises one or more multimerization domain(s) with a molecular weight of between 10,000 Da and 100,000 Da (e.g. Small molecule scaffold, polymers e.g. dextran, streptavidin, IgG, pentamer structure) such as from 10,000 Da to 20,000 Da, for example from 20,000 Da to 30,000 Da, such as from 30,000 Da to 40,000 Da, for example from 40,000 Da to 50,000 Da, such as from 50,000 Da to 60,000 Da, for example from 60,000 Da to 70,000 Da, such as from 70,000 Da to 80,000 Da, for example from 80,000 Da to 90,000 Da, such as from 90,000 Da to 100,000 Da.

731. The composition according to any of claims 684-730, wherein the one or more multimerization domains(s) comprises one or more multimerization domain(s) with a molecular weight of between 100,000 Da and 1,000,000 Da (e.g. Small molecule scaffold, polymers e.g. dextran, streptavidin, IgG, pentamer structure) such as from 100,000 Da to 200,000 Da, for example from 200,000 Da to 300,000 Da, such as from 300,000 Da to 400,000 Da, for example from 400,000 Da to 500,000 Da, such as from 500,000 Da to 600,000 Da, for example from 600,000 Da to 700,000 Da, such as from 700,000 Da to 800,000 Da, for example from 800,000 Da to 900,000 Da, such as from 900,000 Da to 1,000,000 Da.

732. The composition according to any of claims 684-731, wherein the one or more multimerization domains(s) comprises one or more multimerization domain(s) with a molecular weight of more than 1,000,000 Da (e.g. Small molecule scaffold, polymers e.g. dextran, streptavidin, IgG, pentamer structure, cells, liposomes, artificial lipid bi layers, polystyrene beads and other beads) such as more than 2,000,000 Da, for example more than 3,000,000 Da, such as more than 5,000,000, for example more than 10,000,000 Da.

733. The composition according to any of claims 684-732, wherein the one or more multimerization domains(s) comprises one or more multimerization domain(s) with a molecular weight in the range 50,000 Da to 5,000,000 Da, such as from 50,000 Da to 100,000 Da, for example from 100,000 Da to 200,000 Da, such as from 200,000 Da to 300,000 Da, for example from 300,000 Da to 400,000 Da, such as from 400,000 Da to 500,000 Da, for example from 500,000 Da to 600,000 Da, such as from 600,000 Da to 700,000 Da, for example from 700,000 Da to 800,000 Da, such as from 800,000 Da to 900,000 Da, for example from 900,000 Da to 1,000,000 Da, such as from 1,000,000 Da to 1,200,000 Da, for example from 1,200,000 Da to 1,400,000 Da, such as from 1,400,000 Da to 1,600,000 Da, for example from 1,600,000 Da to 1,800,000 Da, such as from 1,800,000 Da to 2,000,000 Da, for example from 2,000,000 Da to 2,200,000 Da, such as from 2,200,000 Da to 2,400,000 Da, for example from 2,400,000 Da to 2,600,000 Da, such as from 2,600,000 Da to 2,800,000 Da, for example from 2,800,000 Da to 3,000,000 Da, such as from 3,000,000 Da to 3,200,000 Da, for example from 3,200,000 Da to 3,400,000 Da, such as from 3,400,000 Da to 3,600,000 Da, for example from 3,600,000 Da to 3,800,000 Da, such as from 3,800,000 Da to 4,000,000 Da, for example from 4,000,000 Da to 4,200,000 Da, such as from 4,200,000 Da to 4,400,000 Da, for example from 4,400,000 Da to 4,600,000 Da, such as from 4,600,000 Da to 4,800,000 Da, for example from 4,800,000 Da to 5,000,000 Da.

734. The composition according to any of claims 1-733, wherein the one or more biologically active molecules according to any of claims 28-683 and the one or more multimerization domain according to any of claims 684-733 are coupled.

735. The composition according to claim 734, wherein the one or more biologically active molecules and the one or more multimerization domains(s) are coupled by chemical reactions between reactive groups of the multimerization domain and reactive groups on the biologically active molecule.

736. The composition according to any of claims 734-735, wherein coupling comprises coupling by non-covalent interaction between a part of the biologically active molecule (e.g. a biotinylated peptide component) and the multimerization domain (e.g. four binding sites for biotin on the strepavidin tetrameric protein).

737. The composition according to any of claims 734-736, wherein the coupling comprises non-covalent association of amino acid helices fused to one component of a biologically active molecule, to form e.g. a pentameric pharmamer, held together by e.g. five helices in a coiled-coil structure making up the multimerization domain.

738. The composition according to any of claims 734-737, wherein the one or more biologically active molecules and the one or more multimerization domains(s) are coupled by one or more chemical reactions.

739. The composition according to claim 738, wherein the one or more chemical reactions comprises nucleophilic substitution by activation of electrophiles (e.g. acylation such as amide formation, pyrazolone formation, isoxazolone formation; alkylation; vinylation; disulfide formation).

740. The composition according to claim 738, wherein the one or more chemical reactions comprises addition to carbon-hetero multiple bonds (e.g. alkene formation by reaction of phosphonates with aldehydes or ketones; arylation; alkylation of arenes/hetarenes by reaction with alkyl boronates or enolethers).

741. The composition according to claim 738, wherein the one or more chemical reactions comprises nucleophilic substitution using activation of nucleophiles (e.g. condensations; alkylation of aliphatic halides or tosylates with enolethers or enamines).

742. The composition according to claim 738, wherein the one or more chemical reactions comprises cycloadditions.

743. The composition according to claim 738, wherein the one or more biologically active molecules and the one or more multimerization domains(s) are coupled one or more non-covalent interaction(s).

744. The composition according to claim 743, wherein the one or more non-covalent interaction(s) comprises streptavidin/biotin.

745. The composition according to claim 743, wherein the one or more non-covalent interaction(s) comprises avidin/biotin.

746. The composition according to claim 743, wherein the one or more non-covalent interaction(s) comprises antibody/antigen.

747. The composition according to claim 743, wherein the one or more non-covalent interaction(s) comprises DNA/DNA.

748. The composition according to claim 743, wherein the one or more non-covalent interaction(s) comprises DNA/PNA.

749. The composition according to claim 743, wherein the one or more non-covalent interaction(s) comprises DNA/RNA.

750. The composition according to claim 743, wherein the one or more non-covalent interaction(s) comprises PNA/PNA.

751. The composition according to claim 743, wherein the one or more non-covalent interaction(s) comprises LNA/DNA.

752. The composition according to claim 743, wherein the one or more non-covalent interaction(s) comprises leucine zipper e.g. Fos/Jun.

753. The composition according to claim 743, wherein the one or more non-covalent interaction(s) comprises IgG dimeric protein.

754. The composition according to claim 743, wherein the one or more non-covalent interaction(s) comprises IgM multivalent protein.

755. The composition according to claim 743, wherein the one or more non-covalent interaction(s) comprises acid/base coiled-coil helices.

756. The composition according to claim 743, wherein the one or more non-covalent interaction(s) comprises chelate/metal ion-bound chelate.

757. The composition according to claim 743, wherein the one or more non-covalent interaction(s) comprises streptavidin (SA) and avidin and derivatives thereof.

758. The composition according to claim 743, wherein the one or more non-covalent interaction(s) comprises biotin.

759. The composition according to claim 743, wherein the one or more non-covalent interaction(s) comprises immunoglobulins.

760. The composition according to claim 743, wherein the one or more non-covalent interaction(s) comprises antibodies (monoclonal, polyclonal, and recombinant).

761. The composition according to claim 743, wherein the one or more non-covalent interaction(s) comprises antibody fragments and derivatives thereof.

762. The composition according to claim 743, wherein the one or more non-covalent interaction(s) comprises leucine zipper domain of AP-1 (jun and fos).

763. The composition according to claim 743, wherein the one or more non-covalent interaction(s) comprises hexa-his (metal chelate moiety).

764. The composition according to claim 743, wherein the one or more non-covalent interaction(s) comprises hexa-hat GST (glutathione S-transferase) glutathione affinity.

765. The composition according to claim 743, wherein the one or more non-covalent interaction(s) comprises Calmodulin-binding peptide (CBP).

766. The composition according to claim 743, wherein the one or more non-covalent interaction(s) comprises Strep-tag.

767. The composition according to claim 743, wherein the one or more non-covalent interaction(s) comprises Cellulose Binding Domain.

768. The composition according to claim 743, wherein the one or more non-covalent interaction(s) comprises one or more of the molecules selected from the group consisting of Maltose Binding Protein, S-Peptide Tag, Chitin Binding Tag, Immuno-reactive Epitopes, Epitope Tags, E2Tag, HA Epitope Tag, Myc Epitope, FLAG Epitope, AU1 and AU5 Epitopes, Glu-Glu Epitope, KT3 Epitope, IRS Epitope, Btag Epitope, Protein Kinase-C Epitope, VSV Epitope, lectins that mediate binding to a diversity of compounds, including carbohydrates, lipids and proteins, e.g. Con A (Canavalia ensiformis) or WGA (wheat germ agglutinin) and tetranectin or Protein A or G (antibody affinity).

769. The composition according to any of claims 1-768, wherein the composition comprises one or more vaccine adjuvant(s).

770. The composition according to any of claims 1-769, wherein the composition comprises more than 1 vaccine adjuvant, such as more than 2, 3, 4, 5, 6, 7, 8, 9, 10, 11, 12, 13, 14, 15, 16, 17, 18, 19, 20, 25, 30, 35, 40, 45, 50, 55, 60, 65, 70, 75, 80, 85, 90, 95, 100, 200, 300, 400, 500, 600, 700, 800, 900, 1,000, 2,000, 3,000, 4,000, 5,000, 6,000, 7,000, 8,000, 9,000, or more than 10,000 vaccine adjuvants.

771. The composition according to any of claims 1-770, wherein the composition comprises more than 1 different vaccine adjuvant, such as more than 2, 3, 4, 5, 6, 7, 8, 9, 10, 11, 12, 13, 14, 15, 16, 17, 18, 19, 20, 25, 30, 35, 40, 45, 50, 55, 60, 65, 70, 75, 80, 85, 90, 95, 100, 200, 300, 400, 500, 600, 700, 800, 900, 1,000, 2,000, 3,000, 4,000, 5,000, 6,000, 7,000, 8,000, 9,000, or more than 10,000 different vaccine adjuvants.

772. The composition according to any of claims 1-771, wherein the composition comprises more than 1 identical vaccine adjuvant, such as more than 2, 3, 4, 5, 6, 7, 8, 9, 10, 11, 12, 13, 14, 15, 16, 17, 18, 19, 20, 25, 30, 35, 40, 45, 50, 55, 60, 65, 70, 75, 80, 85, 90, 95, 100, 200, 300, 400, 500, 600, 700, 800, 900, 1,000, 2,000, 3,000, 4,000, 5,000, 6,000, 7,000, 8,000, 9,000, or more than 10,000 identical vaccine adjuvants.

773. The composition according to any of claims 1-772, wherein the composition comprises less than 10,000 vaccine adjuvants, such as for example less than 9,000, 8,000, 7,000, 6,000, 5,000, 4,000, 3,000, 2,000, 1,000, 900, 800, 700, 600, 500, 400, 300, 200, 100, 95, 90, 85, 80, 75, 70, 65, 60, 55, 50, 45, 40, 35, 30, 25, 20, 15, 10, 9, 8, 7, 6, 5, 4, 3, or less than 2 vaccine adjuvants.

774. The composition according to any of claims 1-773, wherein the composition comprises less than 10,000 different vaccine adjuvants, such as for example less than 9,000, 8,000, 7,000, 6,000, 5,000, 4,000, 3,000, 2,000, 1,000, 900, 800, 700, 600, 500, 400, 300, 200, 100, 95, 90, 85, 80, 75, 70, 65, 60, 55, 50, 45, 40, 35, 30, 25, 20, 15, 10, 9, 8, 7, 6, 5, 4, 3, or less than 2 different vaccine adjuvants.

775. The composition according to any of claims 1-774, wherein the composition comprises less than 10,000 identical vaccine adjuvants, such as for example less than 9,000, 8,000, 7,000, 6,000, 5,000, 4,000, 3,000, 2,000, 1,000, 900, 800, 700, 600, 500, 400, 300, 200, 100, 95, 90, 85, 80, 75, 70, 65, 60, 55, 50, 45, 40, 35, 30, 25, 20, 15, 10, 9, 8, 7, 6, 5, 4, 3, or less than 2 identical vaccine adjuvants.

776. The composition according to any of claims 769-775, wherein the one or more vaccine adjuvant(s) increases or otherwise modifies the immune response to said vaccine.

777. The composition according to any of claims 769-776, wherein the one or more vaccine adjuvant(s) elicit an earlier and/or more potent immune response to said vaccine.

778. The composition according to any of claims 769-777, wherein the one or more vaccine adjuvant(s) elicit a prolonged and/or more potent immune response to said vaccine.

779. The composition according to any of claims 769-778, wherein the one or more vaccine adjuvant(s) results in increased humoral immunity to said vaccine.

780. The composition according to any of claims 769-779, wherein the one or more vaccine adjuvant(s) results in induction of the complement pathway.

781. The composition according to any of claims 769-780, wherein the one or more vaccine adjuvant(s) results in increased cell mediated immunity to said vaccine.

782. The composition according to any of claims 769-781, wherein the one or more vaccine adjuvant(s) comprises one or more antigenic determinant(s).

783. The composition according to any of claims 769-782, wherein the one or more vaccine adjuvant(s) comprises one or more haptenic determinant(s).

784. The composition according to any of claims 769-783, wherein the one or more vaccine adjuvant(s) comprises one or more mineral adjuvant(s).

785. The composition according to claim 784, wherein the one or more mineral adjuvant(s) comprises one or more aluminium compounds such as one or more aluminium salt(s).

786. The composition according to claim 784, wherein the one or more mineral adjuvant(s) comprises aluminium hydroxide.

787. The composition according to any of claims 769-786, wherein the one or more vaccine adjuvant(s) comprises one or more bacterial adjuvant(s).

788. The composition according to claim 787, wherein one or more bacterial adjuvant(s) are purified.

789. The composition according to claim 787, wherein one or more bacterial adjuvant(s) are chemically purified.

790. The composition according to claim 787, wherein one or more bacterial adjuvant(s) are synthesized.

791. The composition according to claim 787, wherein one or more bacterial adjuvant(s) comprises muramyl dipeptides.

792. The composition according to claim 787, wherein one or more bacterial adjuvant(s) comprises lipid A.

793. The composition according to claim 787, wherein one or more bacterial adjuvant(s) comprises Interleukin 1.

794. The composition according to claim 787, wherein one or more bacterial adjuvant(s) comprises Interleukin 2.

795. The composition according to claim 787, wherein one or more bacterial adjuvant(s) comprises one or more cloned host mediator(s).

796. The composition according to claim 787, wherein one or more bacterial adjuvant(s) comprises Bordetella pertussis.

797. The composition according to claim 787, wherein one or more bacterial adjuvant(s) comprises one or more lipopolysaccharide(s).

798. The composition according to claim 787, wherein one or more bacterial adjuvant(s) comprises Freund's Complete Adjuvant (FCA).

799. The composition according to claim 787, wherein one or more bacterial adjuvant(s) comprises Titermax.

800. The composition according to claim 787, wherein one or more bacterial adjuvant(s) comprises ISCOMS.

801. The composition according to claim 787, wherein one or more bacterial adjuvant(s) comprises Quil A.

802. The composition according to claim 787, wherein one or more bacterial adjuvant(s) comprises ALUN.

803. The composition according to claim 787, wherein one or more bacterial adjuvant(s) comprises one or more Lipid A derivatives.

804. The composition according to claim 787, wherein one or more bacterial adjuvant(s) comprises one or more choleratoxin derivatives.

805. The composition according to claim 787, wherein one or more bacterial adjuvant(s) comprises one or more HSP derivatives.

806. The composition according to claim 787, wherein one or more bacterial adjuvant(s) comprises one or more LPS derivatives.

807. The composition according to claim 787, wherein one or more bacterial adjuvant(s) comprises one or more synthetic peptide matrixes.

808. The composition according to claim 787, wherein one or more bacterial adjuvant(s) comprises GMDP.

809. The composition according to claim 787, wherein one or more bacterial adjuvant(s) comprises one or more lipopolysaccharide(s) and/or derivatives thereof.

810. The composition according to claim 787, wherein one or more bacterial adjuvant(s) comprises one or more lipopolysaccharide(s) and/or derivatives thereof in combination with one or more liposome(s).

811. The composition according to claim 787, wherein one or more bacterial adjuvant(s) comprises one or more lipopolysaccharide(s) and/or derivatives thereof in combination with one or more lipid emulsion(s).

812. The composition according to any of claims 769-811, wherein the one or more vaccine adjuvant(s) comprises one or more plant adjuvant(s).

813. The composition according to claim 812, wherein the one or more plant adjuvant(s) comprises saponin.

814. The composition according to any of claims 769-813, wherein the one or more vaccine adjuvant(s) comprises one or more animal products adjuvant(s).

815. The composition according to claim 814, wherein the one or more animal products adjuvant(s) comprises chitin.

816. The composition according to any of claims 769-815, wherein the one or more vaccine adjuvant(s) comprises one or more synthetic adjuvant(s).

817. The composition according to any of claims 769-816, wherein the one or more vaccine adjuvant(s) comprises one or more host adjuvant(s).

818. The composition according to any of claims 769-817, wherein the one or more vaccine adjuvant(s) comprises one or more antigens precipitated with aluminum salt(s).

819. The composition according to any of claims 769-818, wherein the one or more vaccine adjuvant(s) comprises one or more antigens mixed with or adsorbed to performed aluminum compounds.

820. The composition according to any of claims 769-819, wherein the one or more vaccine adjuvant(s) comprises one or more oil emulsion(s).

821. The composition according to any of claims 769-820, wherein the one or more vaccine adjuvant(s) comprises one or more liposome(s).

822. The composition according to any of claims 769-821, wherein the one or more vaccine adjuvant(s) comprises one or more synthetic polymer(s).

823. The composition according to any of claims 769-822, wherein the one or more vaccine adjuvant(s) act through antigen localization and delivery.

824. The composition according to any of claims 769-823, wherein the one or more vaccine adjuvant(s) act by direct effects on cells making up the immune system, such as macrophages and lymphocytes.

825. The composition according to any of claims 769-824, wherein the one or more vaccine adjuvant(s) act by creation of an antigen depot.

826. The composition according to any of claims 769-825, wherein the one or more vaccine adjuvant(s) comprises Alhydrogel.

827. The composition according to any of claims 769-826, wherein the one or more vaccine adjuvant(s) comprises MF59 and/or the proprietary Montanide ISA720.

828. The composition according to any of claims 769-827, wherein the one or more vaccine adjuvant(s) can be selected from the group consisting of AlK(SO₄)₂, AlNa(SO₄)₂, AlNH₄(SO₄), silica, alum, Al(OH)₃, Ca₃(PO₄)₂, kaolin, carbon, aluminum hydroxide, muramyl dipeptides, N-acetyl-muramyl-L-threonyl-D-isoglutamine (thr-DMP), N-acetyl-nornuramyl-L-alanyl-D-isoglutamine (CGP 11687, also referred to as nor-MDP), N-acetylmuramyul-L-alanyl-D-isoglutaminyl-L-alanine-2-(1′2′-dipalmitoyl-sn-glycero-3-hydroxphosphoryloxy)-ethylamine (CGP 19835A, also referred to as MTP-PE), RIBI (MPL+TDM+CWS) in a 2% squalene/Tween-80® emulsion, lipopolysaccharides and its various derivatives, including lipid A, Freund's Complete Adjuvant (FCA), Freund's Incomplete Adjuvants, Merck Adjuvant 65, polynucleotides (for example, poly IC and poly AU acids), wax D from Mycobacterium, tuberculosis, substances found in Corynebacterium parvum, Bordetella pertussis, and members of the genus Brucella, liposomes or other lipid emulsions, Titermax, ISCOMS, Quil A, ALUN (see U.S. Pat. Nos. 58,767 and 5,554,372), Lipid A derivatives, choleratoxin derivatives, HSP derivatives, LPS derivatives, synthetic peptide matrixes or GMDP, Interleukin 1, Interleukin 2, Montanide ISA-51 and QS-21, Freund's complete or incomplete adjuvant, and killed B. pertussis organisms, used e.g. in combination with alum precipitated antigen.

829. The composition according to any of claims 1-828, wherein the one or more pharmamers comprise one or more HIV and/or SIV vaccines.

830. The composition according to any of claims 1-828, wherein the one or more pharmamers do not comprise one or more HIV and/or SIV vaccines.

831. The composition according to any of claims 1-830, wherein the one or more pharmamers comprise a dextran carrier.

832. The composition according to any of claims 1-830, wherein the one or more pharmamers do not comprise a dextran carrier.

833. The composition according to any of claims 1-832, wherein the one or more pharmamers comprises a dextran carrier derivatized by attachment of Streptavidin e.g. such as 8.6 streptavidin molecules are attached per Dextran molecule.

834. The composition according to any of claims 1-832, wherein the one or more pharmamers do not comprise a dextran carrier derivatized by attachment of Streptavidin e.g. such as 8.6 streptavidin molecules are attached per Dextran molecule.

835. The composition according to any of claims 1-834, wherein the one or more pharmamers comprise a dextran carrier with a molecular weight of 270 kDa.

836. The composition according to any of claims 1-834, wherein the one or more pharmamers do not comprise a dextran carrier with a molecular weight of 270 kDa.

837. The composition according to any of claims 1-836, wherein the one or more pharmamers comprises a dextran carrier with Simian MHC class 1 molecules attached.

838. The composition according to any of claims 1-836, wherein the one or more pharmamers do not comprises a dextran carrier with Simian MHC class 1 molecules attached.

839. The composition according to any of claims 1-838, wherein the one or more pharmamers comprise a dextran carrier with Mamu-A*01(CTPYDINQM) (SEQ ID NO 9569) attached.

840. The composition according to any of claims 1-838, wherein the one or more pharmamers do not comprises a dextran carrier with Mamu-A*01(CTPYDINQM) (SEQ ID NO 9569) attached.

841. The composition according to any of claims 1-840, wherein the one or more pharmamers comprise a dextran carrier with Mamu-A*08(KPCVKLTP) attached (SEQ ID NO 9570).

842. The composition according to any of claims 1-840, wherein the one or more pharmamers do not comprise a dextran carrier with Mamu-A*08(KPCVKLTP) attached (SEQ ID NO 9570).

843. The composition according to any of claims 1-842, wherein the one or more pharmamers comprise a dextran carrier with Mamu-B*17(IRFPKTFGW) (SEQ ID NO 9571) attached.

844. The composition according to any of claims 1-842, wherein the one or more pharmamers do not comprises a dextran carrier with Mamu-B*17(IRFPKTFGW) (SEQ ID NO 9571) attached.

845. The composition according to any of claims 839-844, wherein attachment is done via a COOH-terminal Biotin molecule on the recombinant Mamu heavy chain to streptavidin molecules on the dextran carrier.

846. The composition according to any of claims 839-844, wherein attachment is not done via a COOH-terminal Biotin molecule on the recombinant Mamu heavy chain to streptavidin molecules on the dextran carrier.

847. The composition according to any of claims 1-846, wherein the one or more pharmamers comprises one or more biotinylated synthetic Mamu class 2 peptides.

848. The composition according to any of claims 1-846, wherein the one or more pharmamers do not comprise one or more biotinylated synthetic Mamu class 2 peptides.

849. The composition according to any of claims 1-848, wherein the one or more pharmamers comprises Mamu-DQB1*0601(EFVRFDSAVGEYRAV) (SEQ ID NO 9572).

850. The composition according to any of claims 1-848, wherein the one or more pharmamers do not comprise Mamu-DQB1*0601(EFVRFDSAVGEYRAV) (SEQ ID NO 9572).

851. The composition according to any of claims 1-850, wherein the one or more pharmamers comprises Mamu-DQB1*1808(EFVGFDSYLGVYRPV) (SEQ ID NO 9573).

852. The composition according to any of claims 1-850, wherein the one or more pharmamers do not comprise Mamu-DQB1*1808(EFVGFDSYLGVYRPV) (SEQ ID NO 9573).

853. The composition according to any of claims 1-852, wherein the one or more pharmamers comprises Mamu-DRB*W201 (TREDILERERAQVDTFY) (SEQ ID NO 9574).

854. The composition according to any of claims 1-852, wherein the one or more pharmamers do not comprise Mamu-DRB*W201 (TREDILERERAQVDTFY) (SEQ ID NO 9574).

855. The composition according to any of claims 1-854, wherein the one or more pharmamers comprises recombinant HSP70pep3Bio fragments (a biotinylated HSP70 fragment spanning amino acid residues 359-609) attached to strepavidin sites.

856. The composition according to any of claims 1-854, wherein the one or more pharmamers do not comprise recombinant HSP70pep3Bio fragments (a biotinylated HSP70 fragment spanning amino acid residues 359-609) attached to strepavidin sites.

857. The composition according to any of claims 1-856, wherein the one or more pharmamers comprises HIV-Gag (CTPYDINQM) (SEQ ID NO 9569).

858. The composition according to any of claims 1-856, wherein the one or more pharmamers do not comprises HIV-Gag (CTPYDINQM) (SEQ ID NO 9569).

859. The composition according to any of claims 1-858, wherein the one or more pharmamers comprises HIV-Env (KPCVKLTP) (SEQ ID NO 9570).

860. The composition according to any of claims 1-858, wherein the one or more pharmamers do not comprise HIV-Env (KPCVKLTP) (SEQ ID NO 9570).

861. The composition according to any of claims 1-860, wherein the one or more pharmamers comprises Siv Nef (IRFPKTFGW) (SEQ ID NO 9571).

862. The composition according to any of claims 1-860, wherein the one or more pharmamers do not comprises Siv Nef (IRFPKTFGW) (SEQ ID NO 9571).

863. The composition according to any of claims 1-862, wherein the one or more pharmamers comprises recombinant HIV-1gp140 trimer and SIVp27 attached by Biotin-Strepavidin binding.

864. The composition according to any of claims 1-862, wherein the one or more pharmamers do not comprises recombinant HIV-1gp140 trimer and SIVp27 attached by Biotin-Strepavidin binding.

865. The composition according to any of claims 1-864, wherein the one or more pharmamers comprises Mamu-A*01(CTPYDINQM) (SEQ ID NO 9569), Mamu-DQB1*0601 (EFVRFDSAVGEYRAV) (SEQ ID NO 9572) class 2 peptide, HSP70pep3Bio, and Dextran carrier (e.g. in the molar ratio 10:10:4:1).

866. The composition according to any of claims 1-864, wherein the one or more pharmamers do not comprise Mamu-A*01(CTPYDINQM) (SEQ ID NO 9569), Mamu-DQB1*0601 (EFVRFDSAVGEYRAV) (SEQ ID NO 9572) class 2 peptide, HSP70pep3Bio, and Dextran carrier (e.g. in the molar ratio 10:10:4:1).

867. The composition according to any of claims 1-866, wherein the one or more pharmamers comprises Mamu-A*08 (KPCVKLTP) (SEQ ID NO 9570), Mamu-DQB1*1808 (EFVGFDSYLGVYRPV) (SEQ ID NO 9573) class 2 peptide, HSP70pep3Bio and Dextran carrier (e.g. in the molar ratio 10:10:4:1).

868. The composition according to any of claims 1-866, wherein the one or more pharmamers do not comprise Mamu-A*08 (KPCVKLTP) (SEQ ID NO 9570), Mamu-DQB1*1808 (EFVGFDSYLGVYRPV) (SEQ ID NO 9573) class 2 peptide, HSP70pep3Bio and Dextran carrier (e.g. in the molar ratio 10:10:4:1).

869. The composition according to any of claims 1-868, wherein the one or more pharmamers comprises Mamu-B*17(IRFPKTFGW) (SEQ ID NO 9571), Mamu-DRB*W201 (TREDILERERAQVDTFY) (SEQ ID NO 9574) class 2 peptide, HSP70pep3Bio and Dextran carrier (e.g. in the molar ratio 10:10:4:1).

870. The composition according to any of claims 1-868, wherein the one or more pharmamers do not comprise Mamu-B*17(IRFPKTFGW) (SEQ ID NO 9571), Mamu-DRB*W201 (TREDILERERAQVDTFY) (SEQ ID NO 9574) class 2 peptide, HSP70pep3Bio and Dextran carrier (e.g. in the molar ratio 10:10:4:1).

871. The composition according to any of claims 1-870, wherein the one or more pharmamers comprises Sivp27, HIV-1gp140trimer, HSP70pep3Bio and Dextran carrier (e.g. in the molar ratio 3:10:4).

872. The composition according to any of claims 1-870, wherein the one or more pharmamers do not comprise Sivp27, HIV-1gp140trimer, HSP70pep3Bio and Dextran carrier (e.g. in the molar ratio 3:10:4).

873. The composition according to any of claims 1-872, wherein the one or more pharmamers are absorbed into the adjuvant Alhydrogel (Aluminiumhydroxide gel) as specified by the manufacturer.

874. The composition according to any of claims 1-872, wherein the one or more pharmamers are not absorbed into the adjuvant Alhydrogel (Aluminiumhydroxide gel) as specified by the manufacturer.

875. The composition according to any of claims 1-874, wherein the one or more pharmamers comprises Human MHC class 1 molecules.

876. The composition according to any of claims 1-874, wherein the one or more pharmamers do not comprise Human MHC class 1 molecules.

877. The composition according to any of claims 1-876, wherein the one or more pharmamers comprises HLA-A*0101(IVDCLTEMY) (SEQ ID NO 9575).

878. The composition according to any of claims 1-876, wherein the one or more pharmamers do not comprises HLA-A*0101(IVDCLTEMY) (SEQ ID NO 9575).

879. The composition according to any of claims 1-878, wherein the one or more pharmamers comprises HLA-A*0201(GLIQLVEGV) (SEQ ID NO 9576).

880. The composition according to any of claims 1-878, wherein the one or more pharmamers do not comprises HLA-A*0201(GLIQLVEGV) (SEQ ID NO 9576).

881. The composition according to any of claims 1-880, wherein the one or more pharmamers comprises HLA-A*0301(RIAAWMATY) (SEQ ID NO 9577).

882. The composition according to any of claims 1-880, wherein the one or more pharmamers do not comprise HLA-A*0301(RIAAWMATY) (SEQ ID NO 9577).

883. The composition according to any of claims 1-882, wherein the one or more pharmamers comprises HLA-A*1101(IVTDFSVIK) (SEQ ID NO 9578).

884. The composition according to any of claims 1-882, wherein the one or more pharmamers do not comprise HLA-A*1101(IVTDFSVIK) (SEQ ID NO 9578).

885. The composition according to any of claims 1-884, wherein the one or more pharmamers comprises attachment a COOH-terminal Biotin molecule on recombinant HLA heavy chain to the carrier strepavidin molecules.

886. The composition according to any of claims 1-884, wherein the one or more pharmamers do not comprise attachment a COOH-terminal Biotin molecule on recombinant HLA heavy chain to the carrier strepavidin molecules.

887. The composition according to any of claims 1-886, wherein the one or more pharmamers comprises biotinylated recombinant HLA class 2 protein HLA-DR*0401 and recombinant HSP70pep3Bio fragments (a biotinylated HSP70 fragment spanning amino acid residues 359-609) attached to strepavidin sites.

888. The composition according to any of claims 1-886, wherein the one or more pharmamers do not comprise biotinylated recombinant HLA class 2 protein HLA-DR*0401 and recombinant HSP70pep3Bio fragments (a biotinylated HSP70 fragment spanning amino acid residues 359-609) attached to strepavidin sites.

889. The composition according to any of claims 1-888, wherein the one or more pharmamers comprises USP9Y, ubiquitin specific protease 9 (IVDCLTEMY) (SEQ ID NO 9575).

890. The composition according to any of claims 1-888, wherein the one or more pharmamers do not comprises USP9Y, ubiquitin specific protease 9 (IVDCLTEMY) (SEQ ID NO 9575).

891. The composition according to any of claims 1-890, wherein the one or more pharmamers comprises TRAG-3_{—}4 (GLIQLVEGV) (SEQ ID NO 9576).

892. The composition according to any of claims 1-890, wherein the one or more pharmamers do not comprise TRAG-3_{—}4 (GLIQLVEGV) (SEQ ID NO 9576).

893. The composition according to any of claims 1-892, wherein the one or more pharmamers comprises BCL2L1 (RIAAWMATY) (SEQ ID NO 9577).

894. The composition according to any of claims 1-892, wherein the one or more pharmamers do not comprise BCL2L1 (RIAAWMATY) (SEQ ID NO 9577).

895. The composition according to any of claims 1-894, wherein the one or more pharmamers comprises EBV EBNA3B (IVTDFSVIK) (SEQ ID NO 9578).

896. The composition according to any of claims 1-894, wherein the one or more pharmamers do not comprise EBV EBNA3B (IVTDFSVIK) (SEQ ID NO 9578).

897. The composition according to any of claims 1-896, wherein the one or more pharmamers comprises a HLA class 2 complex without a peptide in the binding groove.

898. The composition according to any of claims 1-896, wherein the one or more pharmamers do not comprise a HLA class 2 complex without a peptide in the binding groove.

899. The composition according to any of claims 1-898, wherein the one or more pharmamers comprises a HLA class 2 complex containing unknown peptides derived from either serum or S2 production cells.

900. The composition according to any of claims 1-898, wherein the one or more pharmamers do not comprise a HLA class 2 complex containing unknown peptides derived from either serum or S2 production cells.

901. The composition according to any of claims 1-900, wherein the one or more pharmamers comprises HLA-A*0101(IVDCLTEMY) (SEQ ID NO 9575), HLA-DR*0401 class 2, HSP70pep3Bio, and Dextran carrier (e.g. in the molar ratio 10:10:4:1).

902. The composition according to any of claims 1-900, wherein the one or more pharmamers do not comprise HLA-A*0101(IVDCLTEMY) (SEQ ID NO 9575), HLA-DR*0401 class 2, HSP70pep3Bio, and Dextran carrier (e.g. in the molar ratio 10:10:4:1).

903. The composition according to any of claims 1-902, wherein the one or more pharmamers comprises HLA-A*0201(GLIQLVEGV) (SEQ ID NO 9576), HLA-A*0301(RIAAWMATY) (SEQ ID NO 9577), HSP70pep3Bio, and Dextran carrier (e.g. in the molar ratio 10:10:4:1).

904. The composition according to any of claims 1-902, wherein the one or more pharmamers do not comprises HLA-A*0201(GLIQLVEGV) (SEQ ID NO 9576), HLA-A*0301(RIAAWMATY) (SEQ ID NO 9577), HSP70pep3Bio, and Dextran carrier (e.g. in the molar ratio 10:10:4:1).

905. The composition according to any of claims 1-904, wherein the one or more pharmamers comprises HLA-A*1101(IVTDFSVIK) (SEQ ID NO 9578), HSP70pep3Bio, and Dextran carrier (e.g. in the molar ratio 10:4:1).

906. The composition according to any of claims 1-904, wherein the one or more pharmamers do not comprise HLA-A*1101(IVTDFSVIK) (SEQ ID NO 9578), HSP70pep3Bio, and Dextran carrier (e.g. in the molar ratio 10:4:1).

907. The composition according to any of claims 1-906, wherein the one or more pharmamers are emulsified with the adjuvant Titermax Gold as specified by the manufacturer.

908. The composition according to any of claims 1-906, wherein the one or more pharmamers are not emulsified with the adjuvant Titermax Gold.

909. The composition according to any of claims 1-908, wherein the one or more pharmamers comprises recombinant HIV-1gp140 trimer and SIVp27 attached by Biotin-Strepavidin binding.

910. The composition according to any of claims 1-908, wherein the one or more pharmamers do not comprise recombinant HIV-1gp140 trimer and SIVp27 attached by Biotin-Strepavidin binding.

911. The composition according to any of claims 1-910, wherein the one or more pharmamers comprises biotinylated recombinant HSP70pep3Bio-CCR5-tripeptide fragment, a biotinylated fusion protein consisting of the HSP70 fragment spanning amino acid residues 359-609 plus the antigenic CCR5 loops, N-terminal loop, Loop1 and Loop2, attached to strepavidin sites.

912. The composition according to any of claims 1-910, wherein the one or more pharmamers do not comprise biotinylated recombinant HSP70pep3Bio-CCR5-tripeptide fragment, a biotinylated fusion protein consisting of the HSP70 fragment spanning amino acid residues 359-609 plus the antigenic CCR5 loops, N-terminal loop, Loop1 and Loop2, attached to strepavidin sites.

913. The composition according to any of claims 1-912, wherein the one or more pharmamers comprises the CCR5 peptides representing the three antigenic loops (N-terminal (MNYQVSSPIYNINYYTSEPC) (SEQ ID NO 9579); Loop1 (HYAAAQWNFGNTMCQ) (SEQ ID NO 9580); Loop2 (YSSHFPYSQYQFWKNFQTLK) (SEQ ID NO 9581)).

914. The composition according to any of claims 1-912, wherein the one or more pharmamers do not comprise the CCR5 peptides representing the three antigenic loops (N-terminal (MNYQVSSPIYNINYYTSEPC) (SEQ ID NO 9579); Loop1 (HYAAAQWNFGNTMCQ) (SEQ ID NO 9580); Loop2 (YSSHFPYSQYQFWKNFQTLK) (SEQ ID NO 9581)).

915. The composition according to any of claims 1-914, wherein the one or more pharmamers comprises Mamu-A*01(CTPYDINQM) (SEQ ID NO 9569), HSP70pep3Bio-CCR5-tripeptide and Dextran carrier (e.g. in the molar ratio 13:10:1).

916. The composition according to any of claims 1-914, wherein the one or more pharmamers do not comprise Mamu-A*01(CTPYDINQM) (SEQ ID NO 9569), HSP70pep3Bio-CCR5-tripeptide and Dextran carrier (e.g. in the molar ratio 13:10:1).

917. The composition according to any of claims 1-916, wherein the one or more pharmamers comprises Mamu-A*08 (KPCVKLTP) (SEQ ID NO 9570), HSP70pep3Bio-CCR5-tripeptide and Dextran carrier (e.g. in the molar ratio 13:10:1).

918. The composition according to any of claims 1-916, wherein the one or more pharmamers do not comprise Mamu-A*08 (KPCVKLTP) (SEQ ID NO 9570), HSP70pep3Bio-CCR5-tripeptide and Dextran carrier (e.g. in the molar ratio 13:10:1).

919. The composition according to any of claims 1-918, wherein the one or more pharmamers comprises Mamu-B*17(IRFPKTFGW) (SEQ ID NO 9571), HSP70pep3Bio-CCR5-tripeptide and Dextran carrier (e.g. in the molar ratio 13:10:1).

920. The composition according to any of claims 1-918, wherein the one or more pharmamers do not comprise Mamu-B*17(IRFPKTFGW) (SEQ ID NO 9571), HSP70pep3Bio-CCR5-tripeptide and Dextran carrier (e.g. in the molar ratio 13:10:1).

921. The composition according to any of claims 1-920, wherein the composition is designed to elicit a multifunctional immune response i.e. a composite immune responses directed against the adaptive and the innate immune system; and/or both parts of the adaptive system i.e. the humoral and the cellular part.

922. The composition according to any of claims 1-920, wherein the composition is not designed to elicit a multifunctional immune response i.e. a composite immune responses directed against the adaptive and the innate immune system; and/or both parts of the adaptive system i.e. the humoral and the cellular part.

923. The composition according to any of claims 1-922, wherein the composition comprises one or more HLA class 1 and/or class 2 molecules.

924. The composition according to any of claims 1-922, wherein the composition does not comprise one or more HLA class 1 and/or class 2 molecules.

925. The composition according to any of claims 1-924, wherein the composition comprises one or more HLA class 1 molecules that are folded or partly folded with human b2Microglobulin and a peptide fitting into the binding groove.

926. The composition according to any of claims 1-924, wherein the composition does not comprise one or more HLA class 1 molecules that are folded or partly folded with human b2Microglobulin and a peptide fitting into the binding groove.

927. The composition according to any of claims 1-926, wherein the composition comprises one or more complete, partial or otherwise modified HLA class 1 heavy chain(s).

928. The composition according to any of claims 1-926, wherein the composition does not comprise one or more complete, partial or otherwise modified HLA class 1 heavy chain(s).

929. The composition according to any of claims 1-928, wherein the composition comprises one or more HLA class 2 molecules consisting of folded or partly folded alpha- and beta-chains with or without a peptide in the binding groove.

930. The composition according to any of claims 1-928, wherein the composition does not comprise one or more HLA class 2 molecules consisting of folded or partly folded alpha- and beta-chains with or without a peptide in the binding groove.

931. The composition according to any of claims 1-930, wherein the composition comprises one or more complete, partial or otherwise modified HLA class 2 alpha- and beta-chains.

932. The composition according to any of claims 1-930, wherein the composition does not comprise one or more complete, partial or otherwise modified HLA class 2 alpha- and beta-chains.

933. The composition according to any of claims 1-932, wherein the composition comprises one or more binding-peptides derived from HIV specific proteins such as Gag-Pol, Pr55(Gag), Vif, Vpr, Tat, Rev, Vpu, Nef, gp160 and derivatives such as gp120, gp41 and gp140.

934. The composition according to any of claims 1-932, wherein the composition does not comprise one or more binding-peptides derived from HIV specific proteins such as Gag-Pol, Pr55(Gag), Vif, Vpr, Tat, Rev, Vpu, Nef, gp160 and derivatives such as gp120, gp41 and gp140.

935. The composition according to any of claims 1-934, wherein the composition comprises one or more binding-peptides that are HIV unrelated.

936. The composition according to any of claims 1-934, wherein the composition comprises one or more binding-peptides that are HIV related.

937. The composition according to any of claims 1-936, wherein the composition comprises HLA class 1 peptides derived from regions of the class 1 heavy chain.

938. The composition according to any of claims 1-936, wherein the composition does not comprise HLA class 1 peptides derived from regions of the class 1 heavy chain.

939. The composition according to any of claims 1-938, wherein the composition comprises HLA class 2 peptides derived from regions of the class 2 alpha and/or beta chain.

940. The composition according to any of claims 1-938, wherein the composition does not comprise HLA class 2 peptides derived from regions of the class 2 alpha and/or beta chain.

941. The composition according to any of claims 1-940, wherein the composition comprises CD4 or part(s) hereof.

942. The composition according to any of claims 1-940, wherein the composition does not comprise CD4 or part(s) hereof.

943. The composition according to any of claims 1-942, wherein the composition comprises CCR 5 (Chemokine Receptor 5) or part(s) hereof.

944. The composition according to any of claims 1-942, wherein the composition does not comprise CCR 5 (Chemokine Receptor 5) or part(s) hereof.

945. The composition according to any of claims 1-944, wherein the composition comprises the extracellular peptide-loops of CCR5.

946. The composition according to any of claims 1-944, wherein the composition does not comprise the extracellular peptide-loops of CCR5.

947. The composition according to any of claims 1-946, wherein the composition comprises HSP70 or part(s) thereof.

948. The composition according to any of claims 1-946, wherein the composition does not comprise HSP70 or part(s) thereof.

949. The composition according to any of claims 1-948, wherein the composition comprises CXCR4 or part(s) hereof.

950. The composition according to any of claims 1-948, wherein the composition do not comprise CXCR4 or part(s) hereof.

951. The composition according to any of claims 1-950, wherein the composition comprises CCR 2 (Chemokine Receptor 2) or part(s) hereof.

952. The composition according to any of claims 1-950, wherein the composition does not comprise CCR 2 (Chemokine Receptor 2) or part(s) hereof.

953. The composition according to any of claims 1-952, wherein the composition comprises CX3CR1 or part(s) hereof.

954. The composition according to any of claims 1-952, wherein the composition does not comprise CX3CR1 or part(s) hereof.

955. The composition according to any of claims 1-954, wherein the composition comprises SDF-1 or part(s) hereof.

956. The composition according to any of claims 1-954, wherein the composition does not comprises SDF-1 or part(s) hereof.

957. The composition according to any of claims 1-956, wherein the composition comprises US28 or part(s) hereof.

958. The composition according to any of claims 1-956, wherein the composition does not comprise US28 or part(s) hereof.

959. The composition according to any of claims 1-958, wherein the composition comprises HIV viral specific proteins i.e. Gag-Pol, Pr55(Gag), Vif, Vpr, Tat, Rev, Vpu, Nef, gp160 and derivatives such as but not limited to gp120, gp41 and gp140.

960. The composition according to any of claims 1-958, wherein the composition does not comprise HIV viral specific proteins i.e. Gag-Pol, Pr55(Gag), Vif, Vpr, Tat, Rev, Vpu, Nef, gp160 and derivatives such as but not limited to gp120, gp41 and gp140.

961. The composition according to any of claims 1-960, wherein the composition comprises Simian Mamu class 1 and/or class 2 molecules (Mokey major histocompatibility antigens).

962. The composition according to any of claims 1-960, wherein the composition does not comprise Simian Mamu class 1 and/or class 2 molecules (Mokey major histocompatibility antigens).

963. The composition according to any of claims 1-962, wherein the composition comprises one or more Mamu class 1 molecules folded or partly folded with one or more human b2Microglobulin and a peptide fitting into the binding groove.

964. The composition according to any of claims 1-962, wherein the composition does not comprise one or more Mamu class 1 molecules folded or partly folded with one or more human b2Microglobulin and a peptide fitting into the binding groove.

965. The composition according to any of claims 1-964, wherein the composition comprises one or more complete, partial or otherwise modified Mamu class 1 heavy chain(s).

966. The composition according to any of claims 1-964, wherein the composition does not comprise one or more complete, partial or otherwise modified Mamu class 1 heavy chain(s).

967. The composition according to any of claims 1-966, wherein the composition comprises one or more Mamu class 2 molecules consisting of folded or partly folded alpha- and beta-chains with or without a peptide in the binding groove.

968. The composition according to any of claims 1-966, wherein the composition does not comprise one or more Mamu class 2 molecules consisting of folded or partly folded alpha- and beta-chains with or without a peptide in the binding groove.

969. The composition according to any of claims 1-968, wherein the composition comprises one or more complete, partial or otherwise modified Mamu class 2 alpha- and beta-chains.

970. The composition according to any of claims 1-968, wherein the composition does not comprise one or more complete, partial or otherwise modified Mamu class 2 alpha- and beta-chains.

971. The composition according to any of claims 1-970, wherein the composition comprises one or more binding-peptides derived from SIV specific proteins such as Gag-Pol, Gag, Vif, Vpx, Envelope protein, and/or Nef.

972. The composition according to any of claims 1-970, wherein the composition does not comprises one or more binding-peptides derived from SIV specific proteins such as Gag-Pol, Gag, Vif, Vpx, Envelope protein, and/or Nef.

973. The composition according to any of claims 1-972, wherein the composition comprises one or more binding-peptides that are SIV unrelated.

974. The composition according to any of claims 1-972, wherein the composition comprises one or more binding-peptides that are SIV related.

975. The composition according to any of claims 1-974, wherein the composition comprises Mamu class 1 peptides derived from regions of the class 1 heavy chain.

976. The composition according to any of claims 1-974, wherein the composition does not comprise Mamu class 1 peptides derived from regions of the class 1 heavy chain.

977. The composition according to any of claims 1-976, wherein the composition comprises Mamu class 2 peptides derived from regions of the class 2 alpha and/or beta chain.

978. The composition according to any of claims 1-976, wherein the composition does not comprise Mamu class 2 peptides derived from regions of the class 2 alpha and/or beta chain.

979. The composition according to any of claims 1-978, wherein the composition comprises SIV viral specific proteins i.e. Gag-Pol, Gag, Vif, Vpx, Envelope protein, Nef; HSP70 (70 kD Heat-shock protein) or part(s) hereof.

980. The composition according to any of claims 1-978, wherein the composition does not comprise SIV viral specific proteins i.e. Gag-Pol, Gag, Vif, Vpx, Envelope protein, Nef; HSP70 (70 kD Heat-shock protein) or part(s) hereof.

981. The composition according to any of claims 1-980, wherein the composition further comprises one or more living virulent organism(s).

982. The composition according to claim 981, wherein the one or more living virulent organism(s) comprises one or more fully virulent organism(s).

983. The composition according to claim 981, wherein the one or more living virulent organism(s) comprises one or more partly virulent organism(s).

984. The composition according to claim 981, wherein the one or more living virulent organism(s) comprises one or more partly virulent organism(s) and one or more fully virulent organism(s).

985. The composition according to claim 983, wherein the one or more partly virulent organism(s) comprises one or more live attenuated microorganism(s).

986. The composition according to claim 985, wherein the one or more live attenuated microorganism(s) are modified by physical means.

987. The composition according to claim 986, wherein the physical means comprises heat.

988. The composition according to claim 985, wherein the one or more live attenuated microorganism(s) are modified by chemical means.

989. The composition according to claim 988, wherein the chemical means comprises one or more chemical(s).

990. The composition according to claim 985, wherein the one or more live attenuated microorganism(s) are modified by genetic manipulation.

991. The composition according to claim 990, wherein the genetic manipulation comprises generation of a recombinant bacteria missing virulence factors.

992. The composition according to claim 985, wherein the one or more live attenuated microorganism(s) are cultured under conditions that disable their virulent properties.

993. The composition according to any of claims 1-992, wherein the composition further comprises one or more killed organism(s).

994. The composition according to claim 993, wherein the one or more killed organism(s) comprises one or more physically killed organism(s).

995. The composition according to claim 994, wherein the one or more physically killed organism(s) is killed by heat.

996. The composition according to claim 994, wherein the one or more physically killed organism(s) is killed by irradiation.

997. The composition according to claim 993, wherein the one or more killed organism(s) comprises one or more chemically killed organism(s).

998. The composition according to claim 997, wherein the one or more chemically killed organism(s) are killed by phenol.

999. The composition according to claim 997, wherein the one or more chemically killed organism(s) are killed by formaldehyde.

1000. The composition according to any of claims 1-999, wherein the composition further comprises one or more fragments of one or more microorganism(s).

1001. The composition according to claim 1000, wherein the one or more fragments of one or more microorganism(s) are isolated directly from the one or more microorganism(s).

1002. The composition according to any of claims 1-1001, wherein the composition comprises early HBV vaccine.

1003. The composition according to claim 1000, wherein the one or more fragments of one or more microorganism(s) are produced by recombinant DNA technology.

1004. The composition according to any of claims 1-1003, wherein the composition further comprises HPV vaccine.

1005. The composition according to any of claims 1-1004, wherein the composition further comprises one or more macromolecule(s).

1006. The composition according to claim 1005, wherein the one or more macromolecule(s) comprises one or more naturally occurring protein(s).

1007. The composition according to claim 1006, wherein the one or more naturally occurring protein(s) are isolated and used directly.

1008. The composition according to claim 1006, wherein the one or more naturally occurring protein(s) that are isolated and used directly comprises one or more cytokine(s).

1009. The composition according to claim 1006, wherein the one or more naturally occurring protein(s) that are isolated and used directly comprises one or more interleukine(s).

1010. The composition according to claim 1006, wherein the one or more naturally occurring protein(s) that are isolated and used directly comprises one or more interferone(s).

1011. The composition according to claim 1006, wherein the one or more naturally occurring protein(s) that are isolated and used directly comprises one or more antibodies(s).

1012. The composition according to claim 1011, wherein the one or more antibodies(s) comprises one or more monoclonal antibodies.

1013. The composition according to claim 1011, wherein the one or more antibodies(s) comprises one or more polyclonal antibodies.

1014. The composition according to claim 1006, wherein the one or more naturally occurring protein(s) are isolated and modified.

1015. The composition according to claim 1014, wherein the one or more naturally occurring protein(s) that are isolated and modified comprises one or more modified toxin(s).

1016. The composition according to claim 1015, wherein the one or more modified toxin(s) are chemically modified.

1017. The composition according to claim 1015, wherein the one or more modified toxin(s) are physically modified.

1018. The composition according to claim 1014, wherein the one or more naturally occurring protein(s) that are isolated and modified comprises one or more modified antibodies.

1019. The composition according to claim 1018, wherein the one or more modified antibodies are chemically modified.

1020. The composition according to claim 1018, wherein the one or more modified antibodies are digested into one or more fragment(s).

1021. The composition according to claim 1018, wherein the one or more fragment(s) comprises one or more Fab fragment(s).

1022. The composition according to claim 1005, wherein the one or more macromolecule(s) comprises one or more recombinant protein(s).

1023. The composition according to claim 1022, wherein the one or more recombinant protein(s) comprises one or more antibodies.

1024. The composition according to claim 1023, wherein the one or more antibodies comprises one or more full length antibodies.

1025. The composition according to claim 1023, wherein the one or more antibodies comprises one or more Fab fragments.

1026. The composition according to claim 1023, wherein the one or more antibodies comprises one or more scFv fragments.

1027. The composition according to claim 1023, wherein the one or more antibodies comprises one or more antibody-like scaffolds.

1028. The composition according to claims 1023 to 1027, wherein the one or more antibodies are natural in sequence.

1029. The composition according to claims 1023 to 1027, wherein the one or more antibodies are artificial in sequence.

1030. The composition according to claim 1029, wherein the one or more antibodies that are artificial in sequence have one or more amino acid substitutions in the binding site.

1031. The composition according to claim 1022, wherein the one or more recombinant protein(s) comprises one or more MHC molecule(s).

1032. The composition according to claim 1031, wherein the one or more MHC molecule(s) are one or more MHC I molecules.

1033. The composition according to claim 1032, wherein the one or more MHC I molecules consists of full length and/or truncated heavy chain, full length and/or truncated beta2m and peptide.

1034. The composition according to claim 1032, wherein the one or more MHC I molecules consists of full length and/or truncated heavy chain and full length and/or truncated beta2m.

1035. The composition according to claim 1032, wherein the one or more MHC I molecules consists of full length and/or truncated heavy chain and peptide.

1036. The composition according to claim 1032, wherein the one or more MHC I molecules consists of full length and/or truncated heavy chain.

1037. The composition according to claim 1031, wherein the one or more MHC molecule(s) are one or more MHC II molecules.

1038. The composition according to claim 1037, wherein the one or more MHC II molecules consists of full length and/or truncated alpha chain and full length and/or truncated beta chain and peptide.

1039. The composition according to claim 1037, wherein the one or more MHC II molecules consists of full length and/or truncated alpha chain and full length and/or truncated beta chain.

1040. The composition according to claim 1022, wherein the one or more recombinant protein(s) comprises one or more cytokine(s).

1041. The composition according to claim 1040, wherein the one or more cytokine(s) are full length.

1042. The composition according to claim 1040, wherein the one or more cytokine(s) are truncated.

1043. The composition according to claim 1022, wherein the one or more recombinant protein(s) comprises one or more interleukine(s).

1044. The composition according to claim 1043, wherein the one or more interleukine(s) are full length.

1045. The composition according to claim 1043, wherein the one or more interleukine(s) are truncated.

1046. The composition according to claim 1043, wherein the one or more recombinant protein(s) comprises one or more interferone(s).

1047. The composition according to claim 1046, wherein the one or more interferone(s) are full length.

1048. The composition according to claim 1046, wherein the one or more interferone(s) are truncated.

1049. The composition according to claim 1005, wherein the one or more macromolecule(s) comprises one or more nucleic acid(s).

1050. The composition according to claim 1049, wherein the one or more nucleic acid(s) comprises DNA.

1051. The composition according to claim 1050, wherein the DNA encodes one or more protein(s).

1052. The composition according to claim 1050, wherein the DNA does not encode one or more protein(s).

1053. The composition according to claim 1049, wherein the one or more nucleic acid(s) comprises RNA.

1054. The composition according to claim 1053, wherein the RNA comprises one or more ribozyme(s).

1055. The composition according to claim 1053, wherein the RNA comprises antisense.

1056. The composition according to claim 1053, wherein the RNA comprises silencing RNA.

1057. The composition according to claim 1049, wherein the one or more nucleic acid(s) comprises LNA.

1058. The composition according to claim 1049, wherein the one or more nucleic acid(s) comprises PNA.

1059. The composition according to claim 1005, wherein the one or more macromolecule(s) comprises one or more carbohydrate(s).

1060. The composition according to claim 1059, wherein the one or more carbohydrate(s) comprises one or more pure carbohydrates.

1061. The composition according to claim 1060, wherein the one or more pure carbohydrates comprises one or more monosaccharides.

1062. The composition according to claim 1061, wherein the one or more monosaccharides are modified.

1063. The composition according to claim 1060, wherein the one or more pure carbohydrates comprises one or more disaccharides.

1064. The composition according to claim 1063, wherein the one or more disaccharides are modified.

1065. The composition according to claim 1060, wherein the one or more pure carbohydrates comprises one or more polysaccharides.

1066. The composition according to claim 1065, wherein the one or more polysaccharides are modified.

1067. The composition according to claim 1059, wherein the one or more carbohydrate(s) comprises one or more glycoprotein(s).

1068. The composition according to claim 1059, wherein the one or more carbohydrate(s) comprises one or more glycolipid(s).

1069. The composition according to claim 1005, wherein the one or more macromolecule(s) are not part of a complex.

1070. The composition according to claim 1005, wherein the one or more macromolecule(s) are part of one or more complex(es).

1071. The composition according to claim 1070, wherein the one or more complex(es) comprises one or more polymer backbone(s).

1072. The composition according to claim 1070, wherein the one or more complex(es) is attached to one or more solid support(s).

1073. The composition according to claim 1070, wherein the complex is attached to one or more bead(s).

1074. The composition according to any of claims 1-1073, wherein the composition further comprises a cell-based vaccine.

1075. The composition according to claim 1074, wherein the cell based vaccine comprises one or more naturally occurring cell(s).

1076. The composition according to claim 1075, wherein the one or more naturally occurring cell(s) are isolated and amplified (by proliferation).

1077. The composition according to claim 1075, wherein the one or more naturally occurring cell(s) are isolated and modified.

1078. The composition according to claim 1077, wherein the one or more naturally occurring cell(s) that are isolated are modified to display one or more specific MHC complex(es).

1079. The composition according to claim 1078, wherein the one or more naturally occurring cell(s) that are isolated and modified to display one or more specific MHC complex(es) are incubated with one or more peptide(s).

1080. The composition according to claim 1078, wherein the one or more naturally occurring cell(s) that are isolated and modified to display one or more specific MHC complex(es) are fused to one or more other cells.

1081. The composition according to claim 1080, wherein the one or more other cells comprise one or more hybridoma cell(s).

1082. The composition according to claim 1078, wherein the one or more naturally occurring cell(s) that are isolated and modified to display one or more specific MHC complex(es) are obtained by one or more transfection(s).

1083. The composition according to claim 1082, wherein the one or more transfection(s) comprises supercoiled plasmid DNA.

1084. The composition according to claim 1000, wherein the one or more transfection(s) comprises siRNA.

1085. The composition according to claim 1082, wherein the one or more transfection(s) comprises protein.

1086. The composition according to claim 1078, wherein the one or more naturally occurring cell(s) that are isolated and modified by one or more chemical modification step(s).

1087. The composition according to claim 1074, wherein the one or more cell based vaccine(s) comprises one or more non-naturally occurring cell(s).

1088. The composition according to claim 1087, wherein the one or more cell based vaccine(s) comprises one or more non-naturally occurring cell(s) that are chemically modified.

1089. The composition according to claim 1087, wherein the one or more cell based vaccine(s) comprises one or more non-naturally occurring cell(s) that are genetically modified.

1090. The composition according to any of claims 1-1089, wherein the composition further comprises a liposome/micelle-based vaccine.

1091. The composition according to any of claims 1-1090, wherein the composition further comprises a nanocluster-based vaccine.

1092. The composition according to claims 1-1091, wherein the composition is in solid form.

1093. The composition according to claims 1-1092, wherein the composition is in insoluble form.

1094. The composition according to claims 1-1093, wherein the composition is in soluble form.

1095. The composition according to claims 1-1094, wherein the composition is in suspension.

1096. The composition according to claims 1-1095, wherein the composition is sterile.

1097. The composition according to claims 1-1096, wherein the composition is prepared as sterile injectables either as liquid solutions or suspensions, aqueous or non-aqueous.

1098. The composition according to claims 1-1097, wherein the composition is prepared in solid form suitable for solution, or suspensions, in liquid prior to use.

1099. The composition according to claims 1-1098, wherein the composition is emulsified.

1100. The composition according to claims 1-1099, wherein the composition is mixed with excipients which are pharmaceutically acceptable such as water, saline, dextrose, glycerol, ethanol or the like and combinations thereof.

1101. The composition according to claims 1-1100, wherein the composition comprises minor amounts of auxiliary substances such as wetting or emulsifying agents, pH buffering agents and the like which enhance the effectiveness of the pharmamer.

1102. The composition according to claims 1-1101, wherein the composition has a pH within the range of 3.5-8, such as in the range 4.5-7.5, such as in the range 5.5-7, such as in the range 6-7.5, most preferably around 7.3.

1103. The composition according to claims 1-1102, wherein the composition has a pH within the range 3.5-7, such as 4-6, such as 5-6, such as 5.3-5.7, such as 5.5.

1104. The composition according to claims 1-1103, wherein the composition is for parenteral administration and wherein the composition is dissolved or suspended in sterile aqueous solution, aqueous propylene glycol or sesame or peanut oil.

1105. The composition according to claims 1-1104, wherein the composition is a liquid composition comprising liquid phases in addition to and to the exclusion of water such as glycerin, vegetable oils such as cottonseed oil, organic esters such as ethyl oleate, and water-oil emulsions.

1106. The composition according to claims 1-1105, wherein the composition comprises one or more suitable pharmaceutical carriers such as inert solid diluents or fillers, sterile aqueous solution and various organic solvents.

1107. The composition according to claims 1-1106, wherein the composition comprises one or more solid carriers such as lactose, terra alba, sucrose, cyclodextrin, talc, gelatine, agar, pectin, acacia, magnesium stearate, stearic acid or lower alkyl ethers of cellulose.

1108. The composition according to claims 1-1107, wherein the composition comprises one or more liquid carriers such as syrup, peanut oil, olive oil, phospholipids, fatty acids, fatty acid amines, polyoxyethylene or water.

1109. The composition according to claims 1-1108, wherein the composition is administered by nasal aerosol or inhalation and wherein the composition is prepared for example, as solutions in saline, employing benzyl alcohol or other suitable preservatives, absorption promoters to enhance bioavailability, employing fluorocarbons, and/or employing other solubilizing or dispersing agents.

1110. The composition according to claims 1-1109, wherein the composition is prepared in unit dosage form.

1111. The composition according to claims 1-1110, wherein the composition is prepared as a lyophilisate.

1112. The composition according to claims 1-1111, wherein the composition comprises a solvent.

1113. The composition according to claims 1-1112, wherein the composition is prepared as an injectable solution.

1114. The composition according to claims 1-1113, wherein the composition is prepared as a dispersion.

1115. The composition according to claims 1-1114, wherein the composition is prepared as a suspension.

1116. The composition according to claims 1-1115, wherein the composition is prepared as a emulsion.

1117. The composition according to claims 1-1116, wherein the composition is prepared as a sterile powders to be reconstituted in sterile injectable solutions or dispersions prior to use.

1118. The composition according to claims 1-1117, wherein the composition is prepared as suppositories.

1119. The composition according to claims 1-1118, wherein the composition is prepared as a spray.

1120. The composition according to claims 1-1119, wherein the composition is prepared as an ointment, creme, or gel.

1121. The composition according to claims 1-1120, wherein the composition is prepared as an inhalant.

1122. The composition according to claims 1-1121, wherein the composition is prepared as a dermal patch.

1123. The composition according to claims 1-1122, wherein the composition is prepared as an implant.

1124. The composition according to claims 1-1123, wherein the composition is prepared as a pill, tablet, lozenge or capsule.

1125. The composition according to claims 1-1124, wherein the composition is formulated for aerosol administration, particularly to the respiratory tract and including intranasal administration.

1126. The composition according to claims 1-1125, wherein the composition is prepared in a pressurized pack with a suitable propellant such as a chlorofluorocarbon (CFC) for example dichlorodifluoromethane, trichlorofluoromethane, or dichlorotetrafluoroethane, carbon dioxide or other suitable gas.

1127. The composition according to claims 1-1126, wherein the composition is a powder comprising a powder base such as lactose, starch, starch derivatives such as hydroxypropylmethyl cellulose and polyvinylpyrrolidine (PVP).

1128. The composition according to claims 1-1127, wherein the composition is prepared as a gel.

1129. The composition according to claims 1-1128, wherein the composition is prepared as a capsules or cartridges of e.g., gelatin or blister packs.

1130. The composition according to claims 1-1129, wherein the composition is prepared as an aerosol prepared, for example, as solutions in saline, employing benzyl alcohol or other suitable preservatives, absorption promoters to enhance bioavailability, employing fluorocarbons, and/or employing other solubilizing or dispersing agents.

1131. The composition according to claims 1-1130, wherein the composition is formulated for parenteral administration.

1132. The composition according to claims 1-1131, wherein the composition is formulated for intravenous administration.

1133. The composition according to claims 1-1132, wherein the composition is formulated for intramuscular administration.

1134. The composition according to claims 1-1133, wherein the composition is formulated for intraarticular formulation.

1135. The composition according to claims 1-1134, wherein the composition is formulated for subcutaneous administration.

1136. The composition according to claims 1-1135, wherein the composition is formulated for intradermal administration.

1137. The composition according to claims 1-1136, wherein the composition is formulated for epicutantous/transdermal administration.

1138. The composition according to claims 1-1137, wherein the composition is formulated for intra-peritoneal administration.

1139. The composition according to claims 1-1138, wherein the composition is formulated for infusion.

1140. The composition according to claims 1-1139, wherein the composition is formulated for oral administration.

1141. The composition according to claims 1-1140, wherein the composition is formulated for nasal administration.

1142. The composition according to claims 1-1141, wherein the composition is formulated for rectal administration.

1143. The composition according to claims 1-1142, wherein the composition is formulated for vaginal administration.

1144. The composition according to claims 1-1143, wherein the composition is formulated for topic administration.

1145. The composition according to claims 1-1144, wherein the composition comprises one or more pharmamers immobilised onto a solid or semi-solid support such as particles, beads, biodegradable particles, sheets, gels, filters, membranes, fibres, capillaries, needles, microtitre strips, tubes, plates or wells, combs, pipette tips, micro arrays, and chips.

1146. The composition according to claims 1-1145, wherein the composition comprises one or more pharmamers immobilised onto particles and beads, which are polymeric, magnetic or superparamagnetic.

1147. The composition according to claims 1-1146, wherein the composition comprises one or more pharmamers that target specific MHC recognising cells.

1148. The composition according to claims 1-1147, wherein the composition comprises one or more pharmamers capable of induction of a response in specific target MHC recognising cells by addressing receptors on such cells.

1149. The composition according to any of claims 1-1148, wherein the one or more biological active molecules and the one or more multimerization domain are coupled by a mechanism comprising biotinylation.

1150. The composition according to claim 1149, where the mechanism comprises Streptavidin and/or Avidin and Biotin.

1151. The composition according to claim 1149, where the mechanism comprises enzymatic biotinylation.

1152. The composition according to claim 1149, where the mechanism comprises non-enzymatic biotinylation.

1153. The composition according to any of claims 1-1152, wherein the one or more biological active molecules are directly bound to the multimerization domain.

1154. The composition according to any of claims 1-1153, wherein the one or more biological active molecules are indirectly bound to the multimerization domain.

1155. The composition according to any of claims 1-1154, wherein the one or more biological active molecules are not directly bound to the multimerization domain.

1156. The composition according to any of claims 1-1155, wherein the one or more biological active molecules are not indirectly bound to the multimerization domain.

1157. The composition according to any of the claims 1-1156, wherein the one or more biologically active molecules can be selected from the group of biologically active molecules consisting of HLA-A, HLA-B, HLA-C, HLA-E, HLA-F, HLA-G, A*01010101B*070201Cw*010201E*01010101F*01010101G*01010101, A*01010102NB*070202Cw*010202E*01010102F*01010102G*01010102, A*010102B*070203Cw*010203E*01010103F*01010103G*01010103, A*010103B*070204Cw*010204E*01030101F*01010104G*01010104, A*010104B*0703Cw*0103E*01030102F*01010105G*01010105, A*0102B*0704Cw*0104E*010302F*01010106G*01010201, A*0103B*070501Cw*0105E*010303F*01010107G*01010202, A*0104NB*070502Cw*0106E*010304F*01010108G*010103, A*0106B*070503Cw*0107E*0104F*01010201G*010104, A*0107B*0706Cw*0108F*01010202G*010105, A*0108B*0707Cw*0109F*01010203G*010106, A*0109B*0708Cw*0110F*01010204G*010107, A*0110B*0709Cw*0111F*01010205G*010108, A*0111NB*0710Cw*0112F*01010301G*010109, A*0112B*0711Cw*0113F*01010302G*010110, A*0113B*0712Cw*020201F*01010303G*0102, A*0114B*0713Cw*020202F*01010304G*0103, A*0115NB*0714Cw*020203F*0102G*010401, A*0116NB*0715Cw*020205F*01030101G*010402, A*0117B*0716Cw*0203F*01030102G*010403, A*0118NB*0717Cw*0204F*0104G*0105N, A*0119B*0718Cw*0205G*0106, A*0120B*0719Cw*0206G*0107, A*02010101B*0720Cw*0207, A*02010102LB*0721Cw*0208, A*020102B*0722Cw*0209, A*020103B*0723Cw*0210, A*020104B*0724Cw*0211, A*020105B*0725Cw*0212, A*020106B*0726Cw*0213, A*020107B*0727Cw*0214, A*020108B*0728Cw*0215, A*020109B*0729Cw*0216, A*020110B*0730Cw*0217, A*020111B*0731Cw*030201, A*020112B*0732Cw*030202, A*0202B*0733Cw*030301, A*020301B*0734Cw*030302, A*020302B*0735Cw*030303, A*0204B*0736Cw*030304, A*0205B*0737Cw*030305, A*020601B*0738Cw*030401, A*020602B*0739Cw*030402, A*020603B*0740Cw*030403, A*0207B*0741Cw*030404, A*0208B*0742Cw*030405, A*0209B*0743Cw*0305, A*0210B*0744Cw*0306, A*0211B*0745Cw*0307, A*0212B*0746Cw*0308, A*0213B*0747Cw*0309, A*0214B*0748Cw*0310, A*0215NB*0749NCw*031101, A*0216B*0750Cw*031102, A*021701B*0751Cw*0312, A*021702B*080101Cw*0313, A*0218B*080102Cw*0314, A*0219B*080103Cw*0315, A*022001B*0802Cw*0316, A*022002B*0803Cw*0317, A*0221B*0804Cw*0318, A*0222B*0805Cw*0319, A*0224B*0806Cw*0320N, A*0225B*0807Cw*0321, A*0226B*0808NCw*0322Q, A*0227B*0809Cw*0323, A*0228B*0810Cw*0324, A*0229B*0811Cw*0325, A*0230B*0812Cw*0326, A*0231B*0813Cw*0327, A*0232NB*0814Cw*0328, A*0233B*0815Cw*0329, A*0234B*0816Cw*0330, A*023501B*0817Cw*0331, A*023502B*0818Cw*0332, A*0236B*0819NCw*0333, A*0237B*0820Cw*0334, A*0238B*0821Cw*0335, A*0239B*0822Cw*04010101, A*0240B*0823Cw*04010102, A*0241B*0824Cw*040102, A*0242B*0825Cw*040103, A*0243NB*0826Cw*040104, A*0244B*0827Cw*0403, A*0245B*0828Cw*040401, A*0246B*0829Cw*040402, A*0247B*0830NCw*0405, A*0248B*0831Cw*0406, A*0249B*1301Cw*0407, A*0250B*130201Cw*0408, A*0251B*130202Cw*0409N, A*0252B*130203Cw*0410, A*0253NB*1303Cw*0411, A*0254B*1304Cw*0412, A*0255B*1306Cw*0413, A*0256B*1307NCw*0414, A*0257B*1308Cw*0415, A*0258B*1309Cw*0416, A*0259B*1310Cw*0417, A*0260B*1311Cw*0418, A*0261B*1312Cw*0419, A*0262B*1313Cw*0420, A*0263B*1314Cw*0421, A*0264B*1315Cw*0423, A*0265B*1316Cw*0424, A*0266B*1317Cw*050101, A*0267B*1401Cw*050102, A*0268B*140201Cw*050103, A*0269B*140202Cw*0502, A*0270B*1403Cw*0503, A*0271B*1404Cw*0504, A*0272B*1405Cw*0505, A*0273B*140601Cw*0506, A*027401B*140602Cw*0507N, A*027402B*1407NCw*0508, A*0275B*15010101Cw*0509, A*0276B*15010102NCw*0510, A*0277B*150102Cw*0511, A*0278B*150103Cw*0512, A*0279B*150104Cw*0513, A*0280B*1502Cw*0514, A*0281B*1503Cw*0515, A*0282NB*1504Cw*06020101, A*0283NB*1505Cw*06020102, A*0284B*1506Cw*060202, A*0285B*1507Cw*0603, A*0286B*1508Cw*0604, A*0287B*1509Cw*0605, A*0288NB*1510Cw*0606, A*0289B*151101Cw*0607, A*0290B*151102Cw*0608, A*0291B*151103Cw*0609, A*0292B*1512Cw*0610, A*0293B*1513Cw*0611, A*0294NB*1514Cw*0612, A*0295B*1515Cw*0613, A*0296B*1516Cw*0614, A*0297B*15170101Cw*070101, A*0299B*15170102Cw*070102, A*03010101B*151702Cw*070103, A*03010102NB*1518Cw*070104, A*03010103B*1519Cw*070105, A*030102B*1520Cw*070106, A*030103B*1521Cw*070107, A*030104B*1523Cw*07020101, A*030105B*1524Cw*07020102, A*0302B*1525Cw*07020103, A*0303NB*1526NCw*0703, A*0304B*1527Cw*070401, A*0305B*1528Cw*070402, A*0306B*1529Cw*0705, A*0307B*1530Cw*0706, A*0308B*1531Cw*0707, A*0309B*1532Cw*0708, A*0310B*1533Cw*0709, A*0311NB*1534Cw*0710, A*0312B*1535Cw*0711, A*0313B*1536Cw*0712, A*0314B*1537Cw*0713, A*0315B*1538Cw*0714, A*0316B*1539Cw*0715, A*0317B*1540Cw*0716, A*0318B*1542Cw*0717, A*0319B*1543Cw*0718, A*0320B*1544Cw*0719, A*0321NB*1545Cw*0720, A*0322B*1546Cw*0721, A*0323B*1547Cw*0722, A*0324B*1548Cw*0723, A*0325B*1549Cw*0724, A*0326B*1550Cw*0725, A*110101B*1551Cw*0726, A*110102B*1552Cw*0727, A*110103B*1553Cw*0728, A*110104B*1554Cw*0729, A*110105B*1555Cw*0730, A*110106B*1556Cw*0731, A*110201B*1557Cw*0732N, A*110202B*1558Cw*0733N, A*1103B*1560Cw*0734, A*1104B*1561Cw*0735, A*1105B*1562Cw*0736, A*1106B*1563Cw*0737, A*1107B*1564Cw*0738, A*1108B*1565Cw*0739, A*1109B*1566Cw*0740, A*1110B*1567Cw*0741, A*1111B*1568Cw*0742, A*1112B*1569Cw*0743, A*1113B*1570Cw*0744, A*1114B*1571Cw*0745, A*1115B*1572Cw*080101, A*1116B*1573Cw*080102, A*1117B*1574Cw*0802, A*1118B*1575Cw*0803, A*1119B*1576Cw*0804, A*1120B*1577Cw*0805, A*1121NB*1578Cw*0806, A*1122B*1579NCw*0807, A*1123B*1580Cw*0808, A*1124B*1581Cw*0809, A*1125B*1582Cw*0810, A*1126B*1583Cw*0811, A*1127B*1584Cw*0812, A*1128B*1585Cw*0813, A*1129B*1586Cw*0814, A*2301B*1587Cw*120201, A*2302B*1588Cw*120202, A*2303B*1589Cw*120203, A*2304B*1590Cw*12030101, A*2305B*1591Cw*12030102, A*2306B*1592Cw*120302, A*2307NB*1593Cw*120303, A*2308NB*1594NCw*120304, A*2309B*1595Cw*120401, A*2310B*1596Cw*120402, A*2311NB*1597Cw*1205, A*2312B*1598Cw*1206, A*2313B*1599Cw*1207, A*2314B*9501Cw*1208, A*24020101B*9502Cw*1209, A*24020102LB*9503Cw*1210, A*240202B*9504Cw*1211, A*240203B*9505Cw*1212, A*240204B*9506Cw*1213, A*240205B*9507Cw*1214, A*240206B*9508Cw*1215, A*240207B*9509Cw*1216, A*240208B*9510Cw*1217, A*240209B*9511NCw*1218, A*240210B*9512Cw*1219, A*240211B*9513Cw*140201, A*240212B*9514Cw*140202, A*240213B*9515Cw*140203, A*240301B*9516Cw*140204, A*240302B*9517Cw*1403, A*2404B*9518Cw*1404, A*2405B*9519Cw*1405, A*2406B*9520Cw*1406, A*2407B*9521Cw*1407N, A*2408B*9522Cw*1408, A*2409NB*180101Cw*150201, A*2410B*180102Cw*150202, A*2411NB*180103Cw*150203, A*2413B*1802Cw*1503, A*2414B*1803Cw*1504, A*2415B*1804Cw*150501, A*2417B*1805Cw*150502, A*2418B*1806Cw*150503, A*2419B*1807Cw*150504, A*2420B*1808Cw*1506, A*2421B*1809Cw*1507, A*2422B*1810Cw*1508, A*2423B*1811Cw*1509, A*2424B*1812Cw*1510, A*2425B*1813Cw*1511, A*2426B*1814Cw*1512, A*2427B*1815Cw*1513, A*2428B*1817NCw*1514, A*2429B*1818Cw*1515, A*2430B*1819Cw*1516, A*2431B*1820Cw*1517, A*2432B*1821Cw*160101, A*2433B*1822Cw*160102, A*2434B*1823NCw*1602, A*2435B*1824Cw*160401, A*2436NB*2701Cw*1606, A*2437B*2702Cw*1607, A*2438B*2703Cw*1608, A*2439B*270401Cw*1609, A*2440NB*270402Cw*1701, A*2441B*270502Cw*1702, A*2442B*270503Cw*1703, A*2443B*270504Cw*1704, A*2444B*270505Cw*1801, A*2445NB*270506Cw*1802, A*2446B*270507, A*2447B*270508, A*2448NB*270509, A*2449B*2706, A*2450B*2707, A*2451B*2708, A*2452B*2709, A*2453B*2710, A*2454B*2711, A*2455B*2712, A*2456B*2713, A*2457B*2714, A*2458B*2715, A*2459B*2716, A*2460NB*2717, A*2461B*2718, A*2462B*2719, A*2463B*2720, A*2464B*2721, A*2465B*2723, A*2466B*2724, A*2467B*2725, A*2468B*2726, A*250101B*2727, A*250102B*2728, A*2502B*2729, A*2503B*2730, A*2504B*2731, A*2505B*2732, A*2506B*2733, A*260101B*2734, A*260102B*2735, A*260103B*2736, A*260104B*350101, A*2602B*350102, A*2603B*350103, A*2604B*350104, A*2605B*350105, A*2606B*350106, A*260701B*350201, A*260702B*350202, A*2608B*3503, A*2609B*350401, A*2610B*350402, A*2611NB*3505, A*2612B*3506, A*2613B*3507, A*2614B*350801, A*2615B*350802, A*2616B*350901, A*2617B*350902, A*2618B*3510, A*2619B*3511, A*2620B*3512, A*2621B*3513, A*2622B*351401, A*2623B*351402, A*2624B*3515, A*2625NB*3516, A*2626B*3517, A*2627B*3518, A*2628B*3519, A*2629B*3520, A*2630B*3521, A*2631B*3522, A*2632B*3523, A*2633B*3524, A*2634B*3525, A*29010101B*3526, A*29010102NB*3527, A*290201B*3528, A*290202B*3529, A*290203B*3530, A*2903B*3531, A*2904B*3532, A*2905B*3533, A*2906B*3534, A*2907B*3535, A*2908NB*3536, A*2909B*3537, A*2910B*3538, A*2911B*3539, A*2912B*3540N, A*2913B*3541, A*2914B*3542, A*2915B*3543, A*2916B*3544, A*300101B*3545, A*300102B*3546, A*300201B*3547, A*300202B*3548, A*300203B*3549, A*3003B*3550, A*3004B*3551, A*3006B*3552, A*3007B*3553N, A*3008B*3554, A*3009B*3555, A*3010B*3556, A*3011B*3557, A*3012B*3558, A*3013B*3559, A*3014LB*3560, A*3015B*3561, A*3016B*3562, A*3017B*3563, A*3018B*3564, A*3019B*3565Q, A*310102B*3566, A*3102B*3567, A*3103B*3568, A*3104B*3569, A*3105B*3570, A*3106B*3571, A*3107B*3572, A*3108B*370101, A*3109B*370102, A*3110B*370103, A*3111B*370104, A*3112B*3702, A*3113B*3703N, A*3114NB*3704, A*3115B*3705, A*3201B*3706, A*3202B*3707, A*3203B*3708, A*3204B*3709, A*3205B*3710, A*3206B*3711, A*3207B*3712, A*3208B*380101, A*3209B*380102, A*3210B*380201, A*3211QB*380202, A*3212B*3803, A*3213B*3804, A*3214B*3805, A*3301B*3806, A*330301B*3807, A*330302B*3808, A*3304B*3809, A*3305B*3810, A*3306B*3811, A*3307B*3812, A*3308B*3813, A*3309B*3814, A*3401B*3815, A*3402B*39010101, A*3403B*39010102L, A*3404B*390103, A*3405B*390104, A*3406B*390201, A*3407B*390202, A*3408B*3903, A*3601B*3904, A*3602B*3905, A*3603B*390601, A*3604B*390602, A*4301B*3907, A*6601B*3908, A*6602B*3909, A*6603B*3910, A*6604B*3911, A*6605B*3912, A*6606B*391301, A*680101B*391302, A*680102B*3914, A*680103B*3915, A*680104B*3916, A*680105B*3917, A*68020101B*3918, A*68020102B*3919, A*680301B*3920, A*680302B*3922, A*6804B*3923, A*6805B*3924, A*6806B*3925N, A*6807B*3926, A*6808B*3927, A*6809B*3928, A*6810B*3929, A*6811NB*3930, A*6812B*3931, A*6813B*3932, A*6814B*3933, A*6815B*3934, A*6816B*3935, A*6817B*3936, A*6818NB*3937, A*6819B*3938Q, A*6820B*3939, A*6821B*3940N, A*6822B*3941, A*6823B*400101, A*6824B*400102, A*6825B*400103, A*6826B*400104, A*6827B*400105, A*6828B*400201, A*6829B*400202, A*6830B*400203, A*6831B*4003, A*6832B*4004, A*6833B*4005, A*6834B*40060101, A*6835B*40060102, A*6836B*400602, A*6901B*4007, A*7401B*4008, A*7402B*4009, A*7403B*4010, A*7404B*4011, A*7405B*4012, A*7406B*4013, A*7407B*401401, A*7408B*401402, A*7409B*401403, A*7410B*4015, A*7411B*4016, A*7412NB*4018, A*8001B*4019, A*9201B*4020, A*9202B*4021, A*9203B*4022N, A*9204B*4023, A*9205B*4024, A*9206B*4025, A*9207B*4026, A*9208B*4027, A*9209B*4028, B*4029, B*4030, B*4031, B*4032, B*4033, B*4034, B*4035, B*4036, B*4037, B*4038, B*4039, B*4040, B*4042, B*4043, B*4044, B*4045, B*4046, B*4047, B*4048, B*4049, B*4050, B*4051, B*4052, B*4053, B*4054, B*4055, B*4056, B*4057, B*4058, B*4059, B*4060, B*4061, B*4062, B*4063, B*4064, B*4065, B*4066, B*4067, B*4068, B*4069, B*4070, B*4101, B*4102, B*4103, B*4104, B*4105, B*4106, B*4107, B*4108, B*4201, B*4202, B*4204, B*420501, B*420502, B*4206, B*4207, B*4208, B*4209, B*44020101, B*44020102S, B*440202, B*440203, B*440204, B*440301, B*440302, B*4404, B*4405, B*4406, B*4407, B*4408, B*4409, B*4410, B*4411, B*4412, B*4413, B*4414, B*4415, B*4416, B*4417, B*4418, B*4419N, B*4420, B*4421, B*4422, B*4423N, B*4424, B*4425, B*4426, B*4427, B*4428, B*4429, B*4430, B*4431, B*4432, B*4433, B*4434, B*4435, B*4436, B*4437, B*4438, B*4439, B*4440, B*4441, B*4442, B*4443, B*4444, B*4445, B*4446, B*4447, B*4448, B*4449, B*4450, B*4451, B*4501, B*4502, B*4503, B*4504, B*4505, B*4506, B*4507, B*460101, B*460102, B*4602, B*4603, B*4604, B*4605, B*4606, B*4607N, B*4608, B*4609, B*47010101, B*47010102, B*4702, B*4703, B*4704, B*4705, B*4801, B*4802, B*480301, B*480302, B*4804, B*4805, B*4806, B*4807, B*4808, B*4809, B*4810, B*4811, B*4812, B*4813, B*4814, B*4815, B*4816, B*4901, B*4902, B*4903, B*4904, B*4905, B*5001, B*5002, B*5004, B*510101, B*510102, B*510103, B*510104, B*510105, B*510106, B*510107, B*510201, B*510202, B*5103, B*5104, B*5105, B*5106, B*5107, B*5108, B*5109, B*5110, B*5111N, B*5112, B*511301, B*511302, B*5114, B*5115, B*5116, B*5117, B*5118, B*5119, B*5120, B*5121, B*5122, B*5123, B*5124, B*5126, B*5127N, B*5128, B*5129, B*5130, B*5131, B*5132, B*5133, B*5134, B*5135, B*5136, B*5137, B*5138, B*5139, B*5140, B*5141N, B*5142, B*5143, B*5144N, B*5145, B*5146, B*520101, B*520102, B*520103, B*520104, B*5202, B*5203, B*5204, B*5205, B*5206, B*5207, B*5208, B*5209, B*5210, B*530101, B*530102, B*530103, B*530104, B*5302, B*5303, B*5304, B*5305, B*5306, B*5307, B*5308, B*5309, B*5310, B*5311, B*5312, B*5401, B*5402, B*5403, B*5404, B*5405N, B*5406, B*5407, B*5408N, B*5409, B*5410, B*5411, B*5412, B*550101, B*550102, B*550103, B*550104, B*550201, B*550202, B*5503, B*5504, B*5505, B*5507, B*5508, B*5509, B*5510, B*5511, B*5512, B*5513, B*5514, B*5515, B*5516, B*5517, B*5518, B*5519, B*5520, B*5521, B*5522, B*5523, B*5524, B*5601, B*5602, B*5603, B*5604, B*560501, B*560502, B*5606, B*5607, B*5608, B*5609, B*5610, B*5611, B*5612, B*5613, B*5614, B*5615, B*5616, B*5617, B*5618, B*5619N, B*570101, B*570102, B*570103, B*5702, B*570301, B*570302, B*5704, B*5705, B*5706, B*5707, B*5708, B*5709, B*5710, B*5711, B*5801, B*5802, B*5804, B*5805, B*5806, B*5807, B*5808, B*5809, B*5810N, B*5811, B*5812, B*5813, B*5814, B*5901, B*5902, B*670101, B*670102, B*6702, B*7301, B*7801, B*780201, B*780202, B*7803, B*7804, B*7805, B*8101, B*8102, B*8201, B*8202, B*8301, HLA-HHLA-JHLA-KHLA-LHLA-P, H*01010101J*01010101K*01010101L*01010101P*01010101, H*01010102J*01010102K*01010102L*01010102P*01010102, H*01010103J*01010103K*01010103L*01010103P*02010101, H*0102J*01010104K*01010104L*010102P*02010102, H*02010101J*01010105K*0102L*0102, H*02010102J*01010106K*0103, H*0202J*01010107, H*0203J*01010108, H*0204J*0201, H*0205, H*0206, and H*0301.

1158. The composition according to any of the claims 1-1157, wherein the one or more biologically active molecules can be selected from the group of biologically active molecules consisting of HLA-DRA, DRA*0101, DRA*010201 and DRA*010202.

1159. The composition according to any of the claims 1-1158, wherein the one or more biologically active molecules can be selected from the group of biologically active molecules consisting of HLA-DRB1, DRB1*010101, DRB1*010102, DRB1*010103, DRB1*010104, DRB1*010105, DRB1*010106, DRB1*010107, DRB1*010108, DRB1*010109, DRB1*010110, DRB1*010201, DRB1*010202, DRB1*010203, DRB1*010204, DRB1*010205, DRB1*0103, DRB1*0104, DRB1*0105, DRB1*0106, DRB1*0107, DRB1*0108, DRB1*0109, DRB1*0110, DRB1*0111, DRB1*0112, DRB1*0113, DRB1*0114, DRB1*0115, DRB1*0116, DRB1*0117, DRB1*0118, DRB1*0119, DRB1*0120, DRB1*0121, DRB1*0122, DRB1*03010101, DRB1*03010102, DRB1*030102, DRB1*030103, DRB1*030104, DRB1*030105, DRB1*030106, DRB1*030107, DRB1*030201, DRB1*030202, DRB1*0303, DRB1*0304, DRB1*030501, DRB1*030502, DRB1*030503, DRB1*0306, DRB1*0307, DRB1*0308, DRB1*0309, DRB1*0310, DRB1*0311, DRB1*0312, DRB1*031301, DRB1*031302, DRB1*0314, DRB1*0315, DRB1*0316, DRB1*0317, DRB1*0318, DRB1*0319, DRB1*0320, DRB1*0321, DRB1*0322, DRB1*0323, DRB1*0324, DRB1*0325, DRB1*0326, DRB1*0327, DRB1*0328, DRB1*0329, DRB1*0330, DRB1*0331, DRB1*0332, DRB1*0333, DRB1*0334, DRB1*0335, DRB1*0336, DRB1*0337, DRB1*0338, DRB1*0339, DRB1*0340, DRB1*0341, DRB1*0342, DRB1*0343, DRB1*0344, DRB1*0345, DRB1*0346, DRB1*0347, DRB1*0348, DRB1*040101, DRB1*040102, DRB1*040103, DRB1*0402, DRB1*040301, DRB1*040302, DRB1*040303, DRB1*040304, DRB1*0404, DRB1*040501, DRB1*040502, DRB1*040503, DRB1*040504, DRB1*040505, DRB1*040506, DRB1*040601, DRB1*040602, DRB1*040701, DRB1*040702, DRB1*040703, DRB1*0408, DRB1*0409, DRB1*0410, DRB1*0411, DRB1*0412, DRB1*0413, DRB1*0414, DRB1*0415, DRB1*0416, DRB1*0417, DRB1*0418, DRB1*0419, DRB1*0420, DRB1*0421, DRB1*0422, DRB1*0423, DRB1*0424, DRB1*0425, DRB1*0426, DRB1*0427, DRB1*0428, DRB1*0429, DRB1*0430, DRB1*0431, DRB1*0432, DRB1*0433, DRB1*0434, DRB1*0435, DRB1*0436, DRB1*0437, DRB1*0438, DRB1*0439, DRB1*0440, DRB1*0441, DRB1*0442, DRB1*0443, DRB1*0444, DRB1*0445, DRB1*0446, DRB1*0447, DRB1*0448, DRB1*0449, DRB1*0450, DRB1*0451, DRB1*0452, DRB1*0453, DRB1*0454, DRB1*0455, DRB1*0456, DRB1*0457, DRB1*0458, DRB1*0459, DRB1*0460, DRB1*0461, DRB1*0462, DRB1*0463, DRB1*0464, DRB1*0465, DRB1*0466, DRB1*0467, DRB1*0468, DRB1*0469, DRB1*0470, DRB1*0471, DRB1*0472, DRB1*0473, DRB1*0474, DRB1*0475, DRB1*0476, DRB1*0477, DRB1*0478, DRB1*07010101, DRB1*07010102, DRB1*070102, DRB1*070103, DRB1*0703, DRB1*0704, DRB1*0705, DRB1*0706, DRB1*0707, DRB1*0708, DRB1*0709, DRB1*0710N, DRB1*0711, DRB1*0712, DRB1*0713, DRB1*0714, DRB1*0715, DRB1*0716, DRB1*0717, DRB1*080101, DRB1*080102, DRB1*080103, DRB1*080104, DRB1*080201, DRB1*080202, DRB1*080203, DRB1*080302, DRB1*080401, DRB1*080402, DRB1*080403, DRB1*080404, DRB1*0805, DRB1*0806, DRB1*0807, DRB1*0808, DRB1*0809, DRB1*0810, DRB1*0811, DRB1*0812, DRB1*0813, DRB1*0814, DRB1*0815, DRB1*0816, DRB1*0817, DRB1*0818, DRB1*0819, DRB1*0820, DRB1*0821, DRB1*0822, DRB1*0823, DRB1*0824, DRB1*0825, DRB1*0826, DRB1*0827, DRB1*0828, DRB1*0829, DRB1*0830, DRB1*0831, DRB1*0832, DRB1*0833, DRB1*0834, DRB1*0835, DRB1*0836, DRB1*090102, DRB1*090103, DRB1*090104, DRB1*090105, DRB1*090201, DRB1*090202, DRB1*0903, DRB1*0904, DRB1*0905, DRB1*0906, DRB1*0907, DRB1*0908, DRB1*100101, DRB1*100102, DRB1*100103, DRB1*1002, DRB1*1003, DRB1*110101, DRB1*110102, DRB1*110103, DRB1*110104, DRB1*110105, DRB1*110106, DRB1*110107, DRB1*110108, DRB1*110109, DRB1*110110, DRB1*11020, DRB1*110202, DRB1*1103, DRB1*110401, DRB1*110402, DRB1*110403, DRB1*110404, DRB1*110405, DRB1*1105, DRB1*110601, DRB1*110602, DRB1*1107, DRB1*110801, DRB1*110802, DRB1*1109, DRB1*11100, DRB1*111002, DRB1*111101, DRB1*111102, DRB1*11120, DRB1*111202, DRB1*111301, DRB1*111302, DRB1*11140, DRB1*111402, DRB1*1115, DRB1*1116, DRB1*1117, DRB1*1118, DRB1*111901, DRB1*111902, DRB1*1120, DRB1*1121, DRB1*1122, DRB1*1123, DRB1*1124, DRB1*1125, DRB1*1126, DRB1*11270, DRB1*112702, DRB1*112801, DRB1*112802, DRB1*1129, DRB1*1130, DRB1*1131, DRB1*1132, DRB1*1133, DRB1*1134, DRB1*1135, DRB1*1136, DRB1*1137, DRB1*1138, DRB1*1139, DRB1*1140, DRB1*1141, DRB1*1142, DRB1*1143, DRB1*1144, DRB1*1145, DRB1*1146, DRB1*1147, DRB1*1148, DRB1*1149, DRB1*1150, DRB1*1151, DRB1*1152, DRB1*1153, DRB1*115401, DRB1*115402, DRB1*1155, DRB1*1156, DRB1*1157, DRB1*1158, DRB1*1159, DRB1*1160, DRB1*1161, DRB1*1162, DRB1*1163, DRB1*1164, DRB1*116501, DRB1*116502, DRB1*1166, DRB1*1167, DRB1*1168, DRB1*1169, DRB1*1170, DRB1*1172, DRB1*1173, DRB1*1174, DRB1*1175, DRB1*1176, DRB1*1177, DRB1*1178, DRB1*1179, DRB1*1180, DRB1*1181, DRB1*120101, DRB1*120102, DRB1*120201, DRB1*120202, DRB1*120203, DRB1*120204, DRB1*120302, DRB1*1204, DRB1*1205, DRB1*1206, DRB1*1207, DRB1*1208, DRB1*1209, DRB1*1210, DRB1*1211, DRB1*1212, DRB1*1213, DRB1*1214, DRB1*1215, DRB1*1216, DRB1*1217, DRB1*1218, DRB1*1219, DRB1*130101, DRB1*130102, DRB1*130103, DRB1*130104, DRB1*130105, DRB1*130201, DRB1*130202, DRB1*130203, DRB1*130301, DRB1*130302, DRB1*1304, DRB1*130501, DRB1*130502, DRB1*1306, DRB1*130701, DRB1*130702, DRB1*1308, DRB1*1309, DRB1*1310, DRB1*131101, DRB1*131102, DRB1*1312, DRB1*1313, DRB1*131401, DRB1*131402, DRB1*131403, DRB1*1315, DRB1*1316, DRB1*1317, DRB1*1318, DRB1*1319, DRB1*1320, DRB1*1321, DRB1*1322, DRB1*1323, DRB1*1324, DRB1*1325, DRB1*1326, DRB1*1327, DRB1*1328, DRB1*1329, DRB1*1330, DRB1*1331, DRB1*1332, DRB1*133301, DRB1*133302, DRB1*133303, DRB1*1334, DRB1*1335, DRB1*1336, DRB1*1337, DRB1*1338, DRB1*1339, DRB1*1340, DRB1*1341, DRB1*1342, DRB1*1343, DRB1*1344, DRB1*1345, DRB1*1346, DRB1*1347, DRB1*1348, DRB1*1349, DRB1*135001, DRB1*135002, DRB1*1351, DRB1*1352, DRB1*1353, DRB1*1354, DRB1*1355, DRB1*1356, DRB1*1357, DRB1*1358, DRB1*1359, DRB1*1360, DRB1*1361, DRB1*1362, DRB1*1363, DRB1*1364, DRB1*1365, DRB1*1366, DRB1*1367, DRB1*1368, DRB1*1369, DRB1*1370, DRB1*1371, DRB1*1372, DRB1*1373, DRB1*1374, DRB1*1375, DRB1*1376, DRB1*1377, DRB1*1378, DRB1*1379, DRB1*1380, DRB1*1381, DRB1*1382, DRB1*1383, DRB1*1384, DRB1*1385, DRB1*1386, DRB1*1387, DRB1*1388, DRB1*1389, DRB1*1390, DRB1*1391, DRB1*1392, DRB1*140101, DRB1*140102, DRB1*140103, DRB1*1402, DRB1*140301, DRB1*140302, DRB1*1404, DRB1*140501, DRB1*140502, DRB1*140503, DRB1*1406, DRB1*140701, DRB1*140702, DRB1*1408, DRB1*1409, DRB1*1410, DRB1*1411, DRB1*1412, DRB1*1413, DRB1*1414, DRB1*1415, DRB1*1416, DRB1*1417, DRB1*1418, DRB1*1419, DRB1*1420, DRB1*1421, DRB1*1422, DRB1*42301, DRB1*142302, DRB1*1424, DRB1*1425, DRB1*1426, DRB1*1427, DRB1*1428, DRB1*1429, DRB1*1430, DRB1*1431, DRB1*143201, DRB1*143202, DRB1*1433, DRB1*1434, DRB1*1435, DRB1*1436, DRB1*1437, DRB1*1438, DRB1*1439, DRB1*1440, DRB1*1441, DRB1*1442, DRB1*1443, DRB1*144401, DRB1*144402, DRB1*1445, DRB1*1446, DRB1*1447, DRB1*1448, DRB1*1449, DRB1*1450, DRB1*1451, DRB1*1452, DRB1*1453, DRB1*1454, DRB1*1455, DRB1*1456, DRB1*1457, DRB1*1458, DRB1*1459, DRB1*1460, DRB1*1461, DRB1*1462, DRB1*1463, DRB1*1464, DRB1*1465, DRB1*1467, DRB1*1468, DRB1*1469, DRB1*1470, DRB1*1471, DRB1*1472, DRB1*1473, DRB1*1474, DRB1*1475, DRB1*1476, DRB1*1477, DRB1*1478, DRB1*1479, DRB1*1480, DRB1*1481, DRB1*1482, DRB1*1483, DRB1*1484, DRB1*1485, DRB1*1486, DRB1*1487, DRB1*1488, DRB1*1489, DRB1*1490, DRB1*15010101, DRB1*15010102, DRB1*150102, DRB1*150103, DRB1*150104, DRB1*150105, DRB1*150106, DRB1*150201, DRB1*150202, DRB1*150203, DRB1*150204, DRB1*150205, DRB1*150206, DRB1*15030101, DRB1*15030102, DRB1*1504, DRB1*1505, DRB1*1506, DRB1*1507, DRB1*1508, DRB1*1509, DRB1*1510, DRB1*1511, DRB1*1512, DRB1*1513, DRB1*1514, DRB1*1515, DRB1*1516, DRB1*1517N, DRB1*1518, DRB1*1519, DRB1*1520, DRB1*1521, DRB1*1522, DRB1*1523, DRB1*1524, DRB1*1525, DRB1*1526, DRB1*1527, DRB1*1528, DRB1*1529, DRB1*1530, DRB1*1531, DRB1*1532, DRB1*1533, DRB1*160101, DRB1*160102, DRB1*160201, DRB1*160202, DRB1*1603, DRB1*1604, DRB1*160501, DRB1*160502, DRB1*1607, DRB1*1608, DRB1*1609, DRB1*1610, DRB1*1611, DRB1*1612, and DRB1*1613N.

1160. The composition according to any of the claims 1-1159, wherein the one or more biologically active molecules can be selected from the group of biologically active molecules consisting of HLA-DRB2-9, DRB2*0101, DRB3*01010201, DRB3*01010202, DRB3*010103, DRB3*010104, DRB3*010105, DRB3*0102, DRB3*0103, DRB3*0104, DRB3*0105, DRB3*0106, DRB3*0107, DRB3*0108, DRB3*0109, DRB3*0110, DRB3*0111, DRB3*0112, DRB3*0113, DRB3*0201, DRB3*020201, DRB3*020202, DRB3*020203, DRB3*020204, DRB3*020205, DRB3*0203, DRB3*0204, DRB3*0205, DRB3*0206, DRB3*0207, DRB3*0208, DRB3*0209, DRB3*0210, DRB3*0211, DRB3*0212, DRB3*0213, DRB3*0214, DRB3*0215, DRB3*0216, DRB3*0217, DRB3*0218, DRB3*0219, DRB3*0220, DRB3*0221, DRB3*0222, DRB3*0223, DRB3*0224, DRB3*030101, DRB3*030102, DRB3*030103, DRB3*0302, DRB3*0303, DRB4*01010101, DRB4*0102, DRB4*01030101, DRB4*01030102N, DRB4*010302, DRB4*010303, DRB4*010304, DRB4*0104, DRB4*0105, DRB4*0106, DRB4*0107, DRB4*0201N, DRB4*0301N, DRB5*010101, DRB5*010102, DRB5*0102, DRB5*0103, DRB5*0104, DRB5*0105, DRB5*0106, DRB5*0107, DRB5*0108N, DRB5*0109, DRB5*0110N, DRB5*0111, DRB5*0112, DRB5*0113, DRB5*0202, DRB5*0203, DRB5*0204, DRB5*0205, DRB6*0101, DRB6*0201, DRB6*0202, DRB7*010101, DRB7*010102, DRB8*0101, and DRB9*0101.

1161. The composition according to any of the claims 1-1160, wherein the one or more biologically active molecules can be selected from the group of biologically active molecules consisting of HLA-DQA1, DQA1*010101, DQA1*010102, DQA1*010201, DQA1*010202, DQA1*010203, DQA1*010204, DQA1*0103, DQA1*010401, DQA1*010402, DQA1*0105, DQA1*0106, DQA1*0107, DQA1*0201, DQA1*030101, DQA1*0302, DQA1*0303, DQA1*040101, DQA1*040102, DQA1*0402, DQA1*0403N, DQA1*0404, DQA1*050101, DQA1*050102, DQA1*0502, DQA1*0503, DQA1*0504, DQA1*0505, DQA1*0506, DQA1*0507, DQA1*0508, DQA1*0509, DQA1*060101, DQA1*060102, and DQA1*0602.

1162. The composition according to any of the claims 1-1161, wherein the one or more biologically active molecules can be selected from the group of biologically active molecules consisting of HLA-DQB1, DQB1*050101, DQB1*050102, DQB1*050201, DQB1*050202, DQB1*050301, DQB1*050302, DQB1*0504, DQB1*0505, DQB1*020101, DQB1*020102, DQB1*0202, DQB1*0203, DQB1*0204, DQB1*0205, DQB1*030101, DQB1*030102, DQB1*030103, DQB1*030104, DQB1*030201, DQB1*030202, DQB1*030203, DQB1*030204, DQB1*030302, DQB1*030303, DQB1*0304, DQB1*030501, DQB1*030502, DQB1*030503, DQB1*030504, DQB1*0306, DQB1*0307, DQB1*0308, DQB1*0309, DQB1*0310, DQB1*0311, DQB1*0312, DQB1*0313, DQB1*0314, DQB1*0315, DQB1*0316, DQB1*0317, DQB1*0318, DQB1*0319, DQB1*0320, DQB1*0321, DQB1*0322, DQB1*0323, DQB1*0324, DQB1*0325, DQB1*040101, DQB1*040102, DQB1*0402, DQB1*0403, DQB1*060101, DQB1*060102, DQB1*060103, DQB1*060104, DQB1*060201, DQB1*060202, DQB1*060301, DQB1*060302, DQB1*060401, DQB1*060402, DQB1*060403, DQB1*060501, DQB1*060502, DQB1*0606, DQB1*0607, DQB1*060801, DQB1*060802, DQB1*0609, DQB1*0610, DQB1*061101, DQB1*061102, DQB1*0612, DQB1*0613, DQB1*061401, DQB1*061402, DQB1*0615, DQB1*0616, DQB1*0617, DQB1*0618, DQB1*0619, DQB1*0620, DQB1*0621, DQB1*0622, DQB1*0623, DQB1*0624, DQB1*0625, DQB1*0626N, DQB1*0627, DQB1*0628, DQB1*0629, DQB1*0630, DQB1*0631, DQB1*0632, DQB1*0633, DQB1*0634, and DQB1*0635.

1163. The composition according to any of the claims 1-1162, wherein the one or more biologically active molecules can be selected from the group of biologically active molecules consisting of HLA-DPA1, DPA1*010301, DPA1*010302, DPA1*010303, DPA1*010304, DPA1*0104, DPA1*0105, DPA1*010601, DPA1*010602, DPA1*0107, DPA1*0108, DPA1*0109, DPA1*0110, DPA1*020101, DPA1*020102, DPA1*020103, DPA1*020104, DPA1*020105, DPA1*020106, DPA1*020201, DPA1*020202, DPA1*020203 DPA1*0203, DPA1*0204, DPA1*0301, DPA1*0302, DPA1*0303, and DPA1*0401.

1164. The composition according to any of the claims 1-1163, wherein the one or more biologically active molecules can be selected from the group of biologically active molecules consisting of HLA-DPB1, DPB1*010101, DPB1*010102, DPB1*010103, DPB1*0102, DPB1*020102, DPB1*020103, DPB1*020104, DPB1*020105, DPB1*020106, DPB1*020107, DPB1*0202, DPB1*0203, DPB1*030101, DPB1*030102, DPB1*0302, DPB1*040101, DPB1*040102, DPB1*0402, DPB1*0403, DPB1*050101, DPB1*050102, DPB1*0502, DPB1*0601, DPB1*0602, DPB1*0801, DPB1*0802, DPB1*0901, DPB1*0902, DPB1*1001, DPB1*1002, DPB1*110101, DPB1*110102, DPB1*1102, DPB1*1301, DPB1*1302, DPB1*1401, DPB1*1402, DPB1*1501, DPB1*1502, DPB1*1601, DPB1*1602, DPB1*1701, DPB1*1702, DPB1*1801, DPB1*1802, DPB1*1901, DPB1*1902, DPB1*200101, DPB1*200102, DPB1*2002, DPB1*2101, DPB1*2102, DPB1*2201, DPB1*2202, DPB1*2301, DPB1*2302N, DPB1*2401, DPB1*2402, DPB1*2501, DPB1*2502, DPB1*260101, DPB1*260102, DPB1*2602, DPB1*2701, DPB1*2801, DPB1*2901, DPB1*3001, DPB1*3101, DPB1*3201, DPB1*3301, DPB1*3401, DPB1*3501, DPB1*3601, DPB1*3701, DPB1*3801, DPB1*3901, DPB1*4001, DPB1*410101, DPB1*410102, DPB1*4401, DPB1*4501, DPB1*4601, DPB1*4701, DPB1*4801, DPB1*4901, DPB1*5001, DPB1*5101, DPB1*5201, DPB1*5301, DPB1*5401, DPB1*5501, DPB1*5601, DPB1*5701, DPB1*5801, DPB1*5901, DPB1*6001, DPB1*6101N, DPB1*6201, DPB1*6301, DPB1*6401N, DPB1*6501, DPB1*6601, DPB1*6701, DPB1*6801, DPB1*6901, DPB1*7001, DPB1*7101, DPB1*7201, DPB1*7301, DPB1*7401, DPB1*7501, DPB1*7601, DPB1*7701, DPB1*7801, DPB1*7901, DPB1*8001, DPB1*8101, DPB1*8201, DPB1*8301, DPB1*8401, DPB1*8501, DPB1*8601, DPB1*8701, DPB1*8801, DPB1*8901, DPB1*9001, DPB1*9101, DPB1*9201, DPB1*9301, DPB1*9401, DPB1*9501, DPB1*9601, DPB1*9701, DPB1*9801, and DPB1*9901.

1165. The composition according to any of the claims 1-1164, wherein the one or more biologically active molecules do not comprise one or more of the molecules listed in claims 1157-1164.

1166. The composition according to any of the claims 1-1165, wherein the one or more biologically active molecules are bound to one or more peptide(s).

1167. The composition according to claim 1166, wherein the one or more peptides comprises one or more peptides selected from the group consisting of the peptides listed in the sequence listing of the present application—i.e. SEQ ID NO 1 to SEQ ID NO 9592.

1168. The composition according to claim 1166, wherein the one or more peptides do not comprise one or more peptides selected from the group consisting of the peptides listed in the sequence listing of the present application—i.e. SEQ ID NO 1 to SEQ ID NO 9592.

1169. The composition according to claim 1166, wherein the one or more peptides comprises one or more nonsense peptides.

1170. The composition according to claim 1166, wherein the one or more peptides do not comprise one or more nonsense peptides.

1171. The composition according to claim 1166, wherein the one or more peptides comprises one or more peptides selected from the group consisting of the peptides listed in the sequence listing of PCT/DK2009/050255.

1172. The composition according to claim 1166, wherein the one or more peptides do not comprise one or more peptides selected from the group consisting of the peptides listed in the sequence listing of PCT/DK2009/050255.

1173. The composition according to claim 1166, wherein the one or more peptides comprises one or more peptides selected from the group consisting of the peptides listed in the sequence listing of PCT/DK2009/050257.

1174. The composition according to claim 1166, wherein the one or more peptides do not comprise one or more peptides selected from the group consisting of the peptides listed in the sequence listing of PCT/DK2009/050257.

1175. The composition according to any of claims 1-1174, wherein the composition comprises HIV viral specific proteins such as Gag-Pol, Pr55(Gag), Vif, Vpr, Tat, Rev, Vpu, Nef, gp160 and derivatives such as but not limited to gp120, gp41 and gp140 and does not comprise any antigenic peptide.

1176. The composition according to any of claims 1-1175, wherein the composition does not comprise HIV viral specific proteins i.e. Gag-Pol, Pr55(Gag), Vif, Vpr, Tat, Rev, Vpu, Nef, gp160 and derivatives such as but not limited to gp120, gp41 and gp140 and does not comprise any antigenic peptide.

1177. The composition according to any of claims 1-1176, wherein the composition comprises Simian Mamu class 1 and/or class 2 molecules (Mokey major histocompatibility antigens) and does not comprise any antigenic peptide.

1178. The composition according to any of claims 1-1177, wherein the composition does not comprise Simian Mamu class 1 and/or class 2 molecules (Mokey major histocompatibility antigens) and does not comprise any antigenic peptide.

1179. The composition according to any of claims 1-1178, wherein the composition comprises one or more Mamu class 1 molecules folded or partly folded with one or more human b2Microglobulin and a peptide fitting into the binding groove and does not comprise any antigenic peptide.

1180. The composition according to any of claims 1-1179, wherein the composition does not comprise one or more Mamu class 1 molecules folded or partly folded with one or more human b2Microglobulin and a peptide fitting into the binding groove and does not comprise any antigenic peptide.

1181. The composition according to any of claims 1-1180, wherein the composition comprises one or more complete, partial or otherwise modified Mamu class 1 heavy chain(s) and does not comprise any antigenic peptide.

1182. The composition according to any of claims 1-1181, wherein the composition does not comprise one or more complete, partial or otherwise modified Mamu class 1 heavy chain(s) and does not comprise any antigenic peptide.

1183. The composition according to any of the claims 1-1182, wherein the one or more biologically active molecules comprises one or more C-terminal fragment(s) of HSP70 (SEQ ID NO 9582).

1184. The composition according to any of the claims 1-1183, wherein the one or more biologically active molecules comprises one or more truncated version(s) of gp140 protein from HIV (SEQ ID NO 9583).

1185. The composition according to any of the claims 1-1184, wherein the one or more biologically active molecules comprises one or more Gag protein p27 (Sivp27) (SEQ ID NO 9584).

1186. The composition according to any of the claims 1-1185, wherein the one or more biologically active molecules comprises one or more HLA-A*0101(IVDCLTEMY) (SEQ ID NO 9588).

1187. The composition according to any of the claims 1-1186, wherein the one or more biologically active molecules comprises one or more HLA-A*1101 (VTDFSVIK) (SEQ ID NO 9589).

1188. The composition according to any of the claims 1-1187, wherein the one or more biologically active molecules comprises one or more HLA-A*0201(GLIQLVEGV) (SEQ ID NO 9590).

1189. The composition according to any of the claims 1-1188, wherein the one or more biologically active molecules comprises one or more HLA-A*0301(RIAAWMATY) SEQ ID NO 9591).

1190. The composition according to any of the claims 1-1189, wherein the one or more biologically active molecules comprises one or more HLA-A*2402(EYRALQLHL) (SEQ ID NO 9592).

1191. The composition according to any of the claims 1-1190, wherein the one or more biologically active molecules comprises one or more HLA DRB1*04.

1192. The composition according to any of the claims 1-1191, wherein the one or more biologically active molecules comprises one or more DRB3*02*03 like sequence such as RFLELLKSECHFFNG (SEQ ID NO 9585).

1193. The composition according to any of the claims 1-1192, wherein the one or more biologically active molecules comprises one or more, DRB4*-like sequence such as RVWNLIRYIYNQEEY (SEQ ID NO 9586).

1194. The composition according to any of the claims 1-1193, wherein the one or more biologically active molecules comprises one or more, DRB5*-like sequence such as FLQQDKYECHFFNG (SEQ ID NO 9587).

1195. The composition according to any of the claims 1-1194, wherein the one or more biologically active molecules do not comprise one or more C-terminal fragment(s) of HSP70 (SEQ ID NO 9582).

1196. The composition according to any of the claims 1-1195, wherein the one or more biologically active molecules do not comprise one or more truncated version(s) of gp140 protein from HIV (SEQ ID NO 9583).

1197. The composition according to any of the claims 1-1196, wherein the one or more biologically active molecules do not comprise one or more Gag protein p27 (Sivp27) (SEQ ID NO 9584).

1198. The composition according to any of the claims 1-1197, wherein the one or more biologically active molecules do not comprise one or more HLA-A*0101(IVDCLTEMY) (SEQ ID NO 9588).

1199. The composition according to any of the claims 1-1198, wherein the one or more biologically active molecules do not comprise one or more HLA-A*1101 (VTDFSVIK) (SEQ ID NO 9589).

1200. The composition according to any of the claims 1-1199, wherein the one or more biologically active molecules do not comprise one or more HLA-A*0201(GLIQLVEGV) (SEQ ID NO 9590).

1201. The composition according to any of the claims 1-1200, wherein the one or more biologically active molecules do not comprise one or more HLA-A*0301(RIAAWMATY) SEQ ID NO 9591).

1202. The composition according to any of the claims 1-1201, wherein the one or more biologically active molecules do not comprise one or more HLA-A*2402(EYRALQLHL) (SEQ ID NO 9592).

1203. The composition according to any of the claims 1-1202, wherein the one or more biologically active molecules do not comprise one or more HLA DRB1*04.

1204. The composition according to any of the claims 1-1203, wherein the one or more biologically active molecules do not comprise one or more DRB3*02*03 like sequence such as RFLELLKSECHFFNG (SEQ ID NO 9585).

1205. The composition according to any of the claims 1-1204, wherein the one or more biologically active molecules do not comprise one or more, DRB4*-like sequences such as RVWNLIRYIYNQEEY (SEQ ID NO 9586).

1206. The composition according to any of the claims 1-1205, wherein the one or more biologically active molecules do not comprise one or more, DRB5*-like sequences such as FLQQDKYECHFFNG (SEQ ID NO 9587).

1207. The composition according to any of the claims 1-1206, wherein the one or more biologically active molecules can be selected from the group of biologically active molecules consisting of HLA-A, HLA-B, HLA-C, HLA-E, HLA-F, HLA-G, A*01010101B*070201Cw*010201E*01010101F*01010101G*01010101, A*01010102NB*070202Cw*010202E*01010102F*01010102G*01010102, A*010102B*070203Cw*010203E*01010103F*01010103G*01010103, A*010103B*070204Cw*010204E*01030101F*01010104G*01010104, A*010104B*0703Cw*0103E*01030102F*01010105G*01010105, A*0102B*0704Cw*0104E*010302F*01010106G*01010201, A*0103B*070501Cw*0105E*010303F*01010107G*01010202, A*0104NB*070502Cw*0106E*010304F*01010108G*010103, A*0106B*070503Cw*0107E*0104F*01010201G*010104, A*0107B*0706Cw*0108F*01010202G*010105, A*0108B*0707Cw*0109F*01010203G*010106, A*0109B*0708Cw*0110F*01010204G*010107, A*0110B*0709Cw*0111F*01010205G*010108, A*0111NB*0710Cw*0112F*01010301G*010109, A*0112B*0711Cw*0113F*01010302G*010110, A*0113B*0712Cw*020201F*01010303G*0102, A*0114B*0713Cw*020202F*01010304G*0103, A*0115NB*0714Cw*020203F*0102G*010401, A*0116NB*0715Cw*020205F*01030101G*010402, A*0117B*0716Cw*0203F*01030102G*010403, A*0118NB*0717Cw*0204F*0104G*0105N, A*0119B*0718Cw*0205G*0106, A*0120B*0719Cw*0206G*0107, A*02010101B*0720Cw*0207, A*02010102 LB*0721Cw*0208, A*020102B*0722Cw*0209, A*020103B*0723Cw*0210, A*020104B*0724Cw*0211, A*020105B*0725Cw*0212, A*020106B*0726Cw*0213, A*020107B*0727Cw*0214, A*020108B*0728Cw*0215, A*020109B*0729Cw*0216, A*020110B*0730Cw*0217, A*020111B*0731Cw*030201, A*020112B*0732Cw*030202, A*0202B*0733Cw*030301, A*020301B*0734Cw*030302, A*020302B*0735Cw*030303, A*0204B*0736Cw*030304, A*0205B*0737Cw*030305, A*020601B*0738Cw*030401, A*020602B*0739Cw*030402, A*020603B*0740Cw*030403, A*0207B*0741Cw*030404, A*0208B*0742Cw*030405, A*0209B*0743Cw*0305, A*0210B*0744Cw*0306, A*0211B*0745Cw*0307, A*0212B*0746Cw*0308, A*0213B*0747Cw*0309, A*0214B*0748Cw*0310, A*0215NB*0749NCw*031101, A*0216B*0750Cw*031102, A*021701B*0751Cw*0312, A*021702B*080101Cw*0313, A*0218B*080102Cw*0314, A*0219B*080103Cw*0315, A*022001B*0802Cw*0316, A*022002B*0803Cw*0317, A*0221B*0804Cw*0318, A*0222B*0805Cw*0319, A*0224B*0806Cw*0320N, A*0225B*0807Cw*0321, A*0226B*0808NCw*0322Q, A*0227B*0809Cw*0323, A*0228B*0810Cw*0324, A*0229B*0811Cw*0325, A*0230B*0812Cw*0326, A*0231B*0813Cw*0327, A*0232 NB*0814Cw*0328, A*0233B*0815Cw*0329, A*0234B*0816Cw*0330, A*023501B*0817Cw*0331, A*023502B*0818Cw*0332, A*0236B*0819NCw*0333, A*0237B*0820Cw*0334, A*0238B*0821Cw*0335, A*0239B*0822Cw*04010101, A*0240B*0823Cw*04010102, A*0241B*0824Cw*040102, A*0242B*0825Cw*040103, A*0243 NB*0826Cw*040104, A*0244B*0827Cw*0403, A*0245B*0828Cw*040401, A*0246B*0829Cw*040402, A*0247B*0830NCw*0405, A*0248B*0831Cw*0406, A*0249B*1301Cw*0407, A*0250B*130201Cw*0408, A*0251B*130202Cw*0409N, A*0252B*130203Cw*0410, A*0253NB*1303Cw*0411, A*0254B*1304Cw*0412, A*0255B*1306Cw*0413, A*0256B*1307NCw*0414, A*0257B*1308Cw*0415, A*0258B*1309Cw*0416, A*0259B*1310Cw*0417, A*0260B*1311Cw*0418, A*0261B*1312Cw*0419, A*0262B*1313Cw*0420, A*0263B*1314Cw*0421, A*0264B*1315Cw*0423, A*0265B*1316Cw*0424, A*0266B*1317Cw*050101, A*0267B*1401Cw*050102, A*0268B*140201Cw*050103, A*0269B*140202Cw*0502, A*0270B*1403Cw*0503, A*0271B*1404Cw*0504, A*0272B*1405Cw*0505, A*0273B*140601Cw*0506, A*027401B*140602Cw*0507N, A*027402B*1407NCw*0508, A*0275B*15010101Cw*0509, A*0276B*15010102NCw*0510, A*0277B*150102Cw*0511, A*0278B*150103Cw*0512, A*0279B*150104Cw*0513, A*0280B*1502Cw*0514, A*0281B*1503Cw*0515, A*0282NB*1504Cw*06020101, A*0283NB*1505Cw*06020102, A*0284B*1506Cw*060202, A*0285B*1507Cw*0603, A*0286B*1508Cw*0604, A*0287B*1509Cw*0605, A*0288NB*1510Cw*0606, A*0289B*151101Cw*0607, A*0290B*151102Cw*0608, A*0291B*151103Cw*0609, A*0292B*1512Cw*0610, A*0293B*1513Cw*0611, A*0294NB*1514Cw*0612, A*0295B*1515Cw*0613, A*0296B*1516Cw*0614, A*0297B*15170101Cw*070101, A*0299B*15170102Cw*070102, A*03010101B*151702Cw*070103, A*03010102NB*1518Cw*070104, A*03010103B*1519Cw*070105, A*030102B*1520Cw*070106, A*030103B*1521Cw*070107, A*030104B*1523Cw*07020101, A*030105B*1524Cw*07020102, A*0302B*1525Cw*07020103, A*0303NB*1526NCw*0703, A*0304B*1527Cw*070401, A*0305B*1528Cw*070402, A*0306B*1529Cw*0705, A*0307B*1530Cw*0706, A*0308B*1531Cw*0707, A*0309B*1532Cw*0708, A*0310B*1533Cw*0709, A*0311NB*1534Cw*0710, A*0312B*1535Cw*0711, A*0313B*1536Cw*0712, A*0314B*1537Cw*0713, A*0315B*1538Cw*0714, A*0316B*1539Cw*0715, A*0317B*1540Cw*0716, A*0318B*1542Cw*0717, A*0319B*1543Cw*0718, A*0320B*1544Cw*0719, A*0321NB*1545Cw*0720, A*0322B*1546Cw*0721, A*0323B*1547Cw*0722, A*0324B*1548Cw*0723, A*0325B*1549Cw*0724, A*0326B*1550Cw*0725, A*110101B*1551Cw*0726, A*110102B*1552Cw*0727, A*110103B*1553Cw*0728, A*110104B*1554Cw*0729, A*110105B*1555Cw*0730, A*110106B*1556Cw*0731, A*110201B*1557Cw*0732N, A*110202B*1558Cw*0733N, A*1103B*1560Cw*0734, A*1104B*1561Cw*0735, A*1105B*1562Cw*0736, A*1106B*1563Cw*0737, A*1107B*1564Cw*0738, A*1108B*1565Cw*0739, A*1109B*1566Cw*0740, A*1110B*1567Cw*0741, A*1111B*1568Cw*0742, A*1112B*1569Cw*0743, A*1113B*1570Cw*0744, A*1114B*1571Cw*0745, A*1115B*1572Cw*080101, A*1116B*1573Cw*080102, A*1117B*1574Cw*0802, A*1118B*1575Cw*0803, A*1119B*1576Cw*0804, A*1120B*1577Cw*0805, A*1121NB*1578Cw*0806, A*1122B*1579NCw*0807, A*1123B*1580Cw*0808, A*1124B*1581Cw*0809, A*1125B*1582Cw*0810, A*1126B*1583Cw*0811, A*1127B*1584Cw*0812, A*1128B*1585Cw*0813, A*1129B*1586Cw*0814, A*2301B*1587Cw*120201, A*2302B*1588Cw*120202, A*2303B*1589Cw*120203, A*2304B*1590Cw*12030101, A*2305B*1591Cw*12030102, A*2306B*1592Cw*120302, A*2307NB*1593Cw*120303, A*2308NB*1594NCw*120304, A*2309B*1595Cw*120401, A*2310B*1596Cw*120402, A*2311NB*1597Cw*1205, A*2312B*1598Cw*1206, A*2313B*1599Cw*1207, A*2314B*9501Cw*1208, A*24020101B*9502Cw*1209, A*24020102LB*9503Cw*1210, A*240202B*9504Cw*1211, A*240203B*9505Cw*1212, A*240204B*9506Cw*1213, A*240205B*9507Cw*1214, A*240206B*9508Cw*1215, A*240207B*9509Cw*1216, A*240208B*9510Cw*1217, A*240209B*9511NCw*1218, A*240210B*9512Cw*1219, A*240211B*9513Cw*140201, A*240212B*9514Cw*140202, A*240213B*9515Cw*140203, A*240301B*9516Cw*140204, A*240302B*9517Cw*1403, A*2404B*9518Cw*1404, A*2405B*9519Cw*1405, A*2406B*9520Cw*1406, A*2407B*9521Cw*1407N, A*2408B*9522Cw*1408, A*2409NB*180101Cw*150201, A*2410B*180102Cw*150202, A*2411NB*180103Cw*150203, A*2413B*1802Cw*1503, A*2414B*1803Cw*1504, A*2415B*1804Cw*150501, A*2417B*1805Cw*150502, A*2418B*1806Cw*150503, A*2419B*1807Cw*150504, A*2420B*1808Cw*1506, A*2421B*1809Cw*1507, A*2422B*1810Cw*1508, A*2423B*1811Cw*1509, A*2424B*1812Cw*1510, A*2425B*1813Cw*1511, A*2426B*1814Cw*1512, A*2427B*1815Cw*1513, A*2428B*1817NCw*1514, A*2429B*1818Cw*1515, A*2430B*1819Cw*1516, A*2431B*1820Cw*1517, A*2432B*1821Cw*160101, A*2433B*1822Cw*160102, A*2434B*1823NCw*1602, A*2435B*1824Cw*160401, A*2436NB*2701Cw*1606, A*2437B*2702Cw*1607, A*2438B*2703Cw*1608, A*2439B*270401Cw*1609, A*2440 NB*270402Cw*1701, A*2441B*270502Cw*1702, A*2442B*270503Cw*1703, A*2443B*270504Cw*1704, A*2444B*270505Cw*1801, A*2445NB*270506Cw*1802, A*2446B*270507, A*2447B*270508, A*2448NB*270509, A*2449B*2706, A*2450B*2707, A*2451B*2708, A*2452B*2709, A*2453B*2710, A*2454B*2711, A*2455B*2712, A*2456B*2713, A*2457B*2714, A*2458B*2715, A*2459B*2716, A*2460 NB*2717, A*2461B*2718, A*2462B*2719, A*2463B*2720, A*2464B*2721, A*2465B*2723, A*2466B*2724, A*2467B*2725, A*2468B*2726, A*250101B*2727, A*250102B*2728, A*2502B*2729, A*2503B*2730, A*2504B*2731, A*2505B*2732, A*2506B*2733, A*260101B*2734, A*260102B*2735, A*260103B*2736, A*260104B*350101, A*2602B*350102, A*2603B*350103, A*2604B*350104, A*2605B*350105, A*2606B*350106, A*260701B*350201, A*260702B*350202, A*2608B*3503, A*2609B*350401, A*2610B*350402, A*2611NB*3505, A*2612B*3506, A*2613B*3507, A*2614B*350801, A*2615B*350802, A*2616B*350901, A*2617B*350902, A*2618B*3510, A*2619B*3511, A*2620B*3512, A*2621B*3513, A*2622B*351401, A*2623B*351402, A*2624B*3515, A*2625NB*3516, A*2626B*3517, A*2627B*3518, A*2628B*3519, A*2629B*3520, A*2630B*3521, A*2631B*3522, A*2632B*3523, A*2633B*3524, A*2634B*3525, A*29010101B*3526, A*29010102NB*3527, A*290201B*3528, A*290202B*3529, A*290203B*3530, A*2903B*3531, A*2904B*3532, A*2905B*3533, A*2906B*3534, A*2907B*3535, A*2908NB*3536, A*2909B*3537, A*2910B*3538, A*2911B*3539, A*2912B*3540N, A*2913B*3541, A*2914B*3542, A*2915B*3543, A*2916B*3544, A*300101B*3545, A*300102B*3546, A*300201B*3547, A*300202B*3548, A*300203B*3549, A*3003B*3550, A*3004B*3551, A*3006B*3552, A*3007B*3553N, A*3008B*3554, A*3009B*3555, A*3010B*3556, A*3011B*3557, A*3012B*3558, A*3013B*3559, A*3014LB*3560, A*3015B*3561, A*3016B*3562, A*3017B*3563, A*3018B*3564, A*3019B*3565Q, A*310102B*3566, A*3102B*3567, A*3103B*3568, A*3104B*3569, A*3105B*3570, A*3106B*3571, A*3107B*3572, A*3108B*370101, A*3109B*370102, A*3110B*370103, A*3111B*370104, A*3112B*3702, A*3113B*3703N, A*3114NB*3704, A*3115B*3705, A*3201B*3706, A*3202B*3707, A*3203B*3708, A*3204B*3709, A*3205B*3710, A*3206B*3711, A*3207B*3712, A*3208B*380101, A*3209B*380102, A*3210B*380201, A*3211QB*380202, A*3212B*3803, A*3213B*3804, A*3214B*3805, A*3301B*3806, A*330301B*3807, A*330302B*3808, A*3304B*3809, A*3305B*3810, A*3306B*3811, A*3307B*3812, A*3308B*3813, A*3309B*3814, A*3401B*3815, A*3402B*39010101, A*3403B*39010102L, A*3404B*390103, A*3405B*390104, A*3406B*390201, A*3407B*390202, A*3408B*3903, A*3601B*3904, A*3602B*3905, A*3603B*390601, A*3604B*390602, A*4301B*3907, A*6601B*3908, A*6602B*3909, A*6603B*3910, A*6604B*3911, A*6605B*3912, A*6606B*391301, A*680101B*391302, A*680102B*3914, A*680103B*3915, A*680104B*3916, A*680105B*3917, A*68020101B*3918, A*68020102B*3919, A*680301B*3920, A*680302B*3922, A*6804B*3923, A*6805B*3924, A*6806B*3925N, A*6807B*3926, A*6808B*3927, A*6809B*3928, A*6810B*3929, A*6811 NB*3930, A*6812B*3931, A*6813B*3932, A*6814B*3933, A*6815B*3934, A*6816B*3935, A*6817B*3936, A*6818NB*3937, A*6819B*3938Q, A*6820B*3939, A*6821B*3940N, A*6822B*3941, A*6823B*400101, A*6824B*400102, A*6825B*400103, A*6826B*400104, A*6827B*400105, A*6828B*400201, A*6829B*400202, A*6830B*400203, A*6831B*4003, A*6832B*4004, A*6833B*4005, A*6834B*40060101, A*6835B*40060102, A*6836B*400602, A*6901B*4007, A*7401B*4008, A*7402B*4009, A*7403B*4010, A*7404B*4011, A*7405B*4012, A*7406B*4013, A*7407B*401401, A*7408B*401402, A*7409B*401403, A*7410B*4015, A*7411B*4016, A*7412NB*4018, A*8001B*4019, A*9201B*4020, A*9202B*4021, A*9203B*4022N, A*9204B*4023, A*9205B*4024, A*9206B*4025, A*9207B*4026, A*9208B*4027, A*9209B*4028, B*4029, B*4030, B*4031, B*4032, B*4033, B*4034, B*4035, B*4036, B*4037, B*4038, B*4039, B*4040, B*4042, B*4043, B*4044, B*4045, B*4046, B*4047, B*4048, B*4049, B*4050, B*4051, B*4052, B*4053, B*4054, B*4055, B*4056, B*4057, B*4058, B*4059, B*4060, B*4061, B*4062, B*4063, B*4064, B*4065, B*4066, B*4067, B*4068, B*4069, B*4070, B*4101, B*4102, B*4103, B*4104, B*4105, B*4106, B*4107, B*4108, B*4201, B*4202, B*4204, B*420501, B*420502, B*4206, B*4207, B*4208, B*4209, B*44020101, B*44020102S, B*440202, B*440203, B*440204, B*440301, B*440302, B*4404, B*4405, B*4406, B*4407, B*4408, B*4409, B*4410, B*4411, B*4412, B*4413, B*4414, B*4415, B*4416, B*4417, B*4418, B*4419N, B*4420, B*4421, B*4422, B*4423N, B*4424, B*4425, B*4426, B*4427, B*4428, B*4429, B*4430, B*4431, B*4432, B*4433, B*4434, B*4435, B*4436, B*4437, B*4438, B*4439, B*4440, B*4441, B*4442, B*4443, B*4444, B*4445, B*4446, B*4447, B*4448, B*4449, B*4450, B*4451, B*4501, B*4502, B*4503, B*4504, B*4505, B*4506, B*4507, B*460101, B*460102, B*4602, B*4603, B*4604, B*4605, B*4606, B*4607N, B*4608, B*4609, B*47010101, B*47010102, B*4702, B*4703, B*4704, B*4705, B*4801, B*4802, B*480301, B*480302, B*4804, B*4805, B*4806, B*4807, B*4808, B*4809, B*4810, B*4811, B*4812, B*4813, B*4814, B*4815, B*4816, B*4901, B*4902, B*4903, B*4904, B*4905, B*5001, B*5002, B*5004, B*510101, B*510102, B*510103, B*510104, B*510105, B*510106, B*510107, B*510201, B*510202, B*5103, B*5104, B*5105, B*5106, B*5107, B*5108, B*5109, B*5110, B*5111N, B*5112, B*511301, B*511302, B*5114, B*5115, B*5116, B*5117, B*5118, B*5119, B*5120, B*5121, B*5122, B*5123, B*5124, B*5126, B*5127N, B*5128, B*5129, B*5130, B*5131, B*5132, B*5133, B*5134, B*5135, B*5136, B*5137, B*5138, B*5139, B*5140, B*5141N, B*5142, B*5143, B*5144N, B*5145, B*5146, B*520101, B*520102, B*520103, B*520104, B*5202, B*5203, B*5204, B*5205, B*5206, B*5207, B*5208, B*5209, B*5210, B*530101, B*530102, B*530103, B*530104, B*5302, B*5303, B*5304, B*5305, B*5306, B*5307, B*5308, B*5309, B*5310, B*5311, B*5312, B*5401, B*5402, B*5403, B*5404, B*5405N, B*5406, B*5407, B*5408N, B*5409, B*5410, B*5411, B*5412, B*550101, B*550102, B*550103, B*550104, B*550201, B*550202, B*5503, B*5504, B*5505, B*5507, B*5508, B*5509, B*5510, B*5511, B*5512, B*5513, B*5514, B*5515, B*5516, B*5517, B*5518, B*5519, B*5520, B*5521, B*5522, B*5523, B*5524, B*5601, B*5602, B*5603, B*5604, B*560501, B*560502, B*5606, B*5607, B*5608, B*5609, B*5610, B*5611, B*5612, B*5613, B*5614, B*5615, B*5616, B*5617, B*5618, B*5619N, B*570101, B*570102, B*570103, B*5702, B*570301, B*570302, B*5704, B*5705, B*5706, B*5707, B*5708, B*5709, B*5710, B*5711, B*5801, B*5802, B*5804, B*5805, B*5806, B*5807, B*5808, B*5809, B*5810N, B*5811, B*5812, B*5813, B*5814, B*5901, B*5902, B*670101, B*670102, B*6702, B*7301, B*7801, B*780201, B*780202, B*7803, B*7804, B*7805, B*8101, B*8102, B*8201, B*8202, B*8301, HLA-HHLA-JHLA-KHLA-LHLA-P, H*01010101J*01010101K*01010101L*01010101P*01010101, H*01010102J*01010102K*01010102L*01010102P*01010102, H*01010103J*01010103K*01010103L*01010103P*02010101, H*0102J*01010104K*01010104L*010102P*02010102, H*02010101J*01010105K*0102L*0102, H*02010102J*01010106K*0103, H*0202J*01010107, H*0203J*01010108, H*0204J*0201, H*0205, H*0206, and H*0301.

1208. The composition according to any of the claims 1-1207, wherein the one or more biologically active molecules can be selected from the group of biologically active molecules consisting of HLA-DRA, DRA*0101, DRA*010201 and DRA*010202.

1209. The composition according to any of the claims 1-1208, wherein the one or more biologically active molecules can be selected from the group of biologically active molecules consisting of HLA-DRB1, DRB1*010101, DRB1*010102, DRB1*010103, DRB1*010104, DRB1*010105, DRB1*010106, DRB1*010107, DRB1*010108, DRB1*010109, DRB1*010110, DRB1*010201, DRB1*010202, DRB1*010203, DRB1*010204, DRB1*010205, DRB1*0103, DRB1*0104, DRB1*0105, DRB1*0106, DRB1*0107, DRB1*0108, DRB1*0109, DRB1*0110, DRB1*0111, DRB1*0112, DRB1*0113, DRB1*0114, DRB1*0115, DRB1*0116, DRB1*0117, DRB1*0118, DRB1*0119, DRB1*0120, DRB1*0121, DRB1*0122, DRB1*03010101, DRB1*03010102, DRB1*030102, DRB1*030103, DRB1*030104, DRB1*030105, DRB1*030106, DRB1*030107, DRB1*030201, DRB1*030202, DRB1*0303, DRB1*0304, DRB1*030501, DRB1*030502, DRB1*030503, DRB1*0306, DRB1*0307, DRB1*0308, DRB1*0309, DRB1*0310, DRB1*0311, DRB1*0312, DRB1*031301, DRB1*031302, DRB1*0314, DRB1*0315, DRB1*0316, DRB1*0317, DRB1*0318, DRB1*0319, DRB1*0320, DRB1*0321, DRB1*0322, DRB1*0323, DRB1*0324, DRB1*0325, DRB1*0326, DRB1*0327, DRB1*0328, DRB1*0329, DRB1*0330, DRB1*0331, DRB1*0332, DRB1*0333, DRB1*0334, DRB1*0335, DRB1*0336, DRB1*0337, DRB1*0338, DRB1*0339, DRB1*0340, DRB1*0341, DRB1*0342, DRB1*0343, DRB1*0344, DRB1*0345, DRB1*0346, DRB1*0347, DRB1*0348, DRB1*040101, DRB1*040102, DRB1*040103, DRB1*0402, DRB1*040301, DRB1*040302, DRB1*040303, DRB1*040304, DRB1*0404, DRB1*040501, DRB1*040502, DRB1*040503, DRB1*040504, DRB1*040505, DRB1*040506, DRB1*040601, DRB1*040602, DRB1*040701, DRB1*040702, DRB1*040703, DRB1*0408, DRB1*0409, DRB1*0410, DRB1*0411, DRB1*0412, DRB1*0413, DRB1*0414, DRB1*0415, DRB1*0416, DRB1*0417, DRB1*0418, DRB1*0419, DRB1*0420, DRB1*0421, DRB1*0422, DRB1*0423, DRB1*0424, DRB1*0425, DRB1*0426, DRB1*0427, DRB1*0428, DRB1*0429, DRB1*0430, DRB1*0431, DRB1*0432, DRB1*0433, DRB1*0434, DRB1*0435, DRB1*0436, DRB1*0437, DRB1*0438, DRB1*0439, DRB1*0440, DRB1*0441, DRB1*0442, DRB1*0443, DRB1*0444, DRB1*0445, DRB1*0446, DRB1*0447, DRB1*0448, DRB1*0449, DRB1*0450, DRB1*0451, DRB1*0452, DRB1*0453, DRB1*0454, DRB1*0455, DRB1*0456, DRB1*0457, DRB1*0458, DRB1*0459, DRB1*0460, DRB1*0461, DRB1*0462, DRB1*0463, DRB1*0464, DRB1*0465, DRB1*0466, DRB1*0467, DRB1*0468, DRB1*0469, DRB1*0470, DRB1*0471, DRB1*0472, DRB1*0473, DRB1*0474, DRB1*0475, DRB1*0476, DRB1*0477, DRB1*0478, DRB1*07010101, DRB1*07010102, DRB1*070102, DRB1*070103, DRB1*0703, DRB1*0704, DRB1*0705, DRB1*0706, DRB1*0707, DRB1*0708, DRB1*0709, DRB1*0710N, DRB1*0711, DRB1*0712, DRB1*0713, DRB1*0714, DRB1*0715, DRB1*0716, DRB1*0717, DRB1*080101, DRB1*080102, DRB1*080103, DRB1*080104, DRB1*080201, DRB1*080202, DRB1*080203, DRB1*080302, DRB1*080401, DRB1*080402, DRB1*080403, DRB1*080404, DRB1*0805, DRB1*0806, DRB1*0807, DRB1*0808, DRB1*0809, DRB1*0810, DRB1*0811, DRB1*0812, DRB1*0813, DRB1*0814, DRB1*0815, DRB1*0816, DRB1*0817, DRB1*0818, DRB1*0819, DRB1*0820, DRB1*0821, DRB1*0822, DRB1*0823, DRB1*0824, DRB1*0825, DRB1*0826, DRB1*0827, DRB1*0828, DRB1*0829, DRB1*0830, DRB1*0831, DRB1*0832, DRB1*0833, DRB1*0834, DRB1*0835, DRB1*0836, DRB1*090102, DRB1*090103, DRB1*090104, DRB1*090105, DRB1*090201, DRB1*090202, DRB1*0903, DRB1*0904, DRB1*0905, DRB1*0906, DRB1*0907, DRB1*0908, DRB1*100101, DRB1*100102, DRB1*100103, DRB1*1002, DRB1*1003, DRB1*110101, DRB1*110102, DRB1*110103, DRB1*110104, DRB1*110105, DRB1*110106, DRB1*110107, DRB1*110108, DRB1*110109, DRB1*110110, DRB1*110201, DRB1*110202, DRB1*1103, DRB1*110401, DRB1*110402, DRB1*110403, DRB1*110404, DRB1*110405, DRB1*1105, DRB1*110601, DRB1*110602, DRB1*1107, DRB1*110801, DRB1*110802, DRB1*1109, DRB1*111001, DRB1*111002, DRB1*111101, DRB1*111102, DRB1*111201, DRB1*111202, DRB1*111301, DRB1*111302, DRB1*111401, DRB1*111402, DRB1*1115, DRB1*1116, DRB1*1117, DRB1*1118, DRB1*111901, DRB1*111902, DRB1*1120, DRB1*1121, DRB1*1122, DRB1*1123, DRB1*1124, DRB1*1125, DRB1*1126, DRB1*112701, DRB1*112702, DRB1*112801, DRB1*112802, DRB1*1129, DRB1*1130, DRB1*1131, DRB1*1132, DRB1*1133, DRB1*1134, DRB1*1135, DRB1*1136, DRB1*1137, DRB1*1138, DRB1*1139, DRB1*1140, DRB1*1141, DRB1*1142, DRB1*1143, DRB1*1144, DRB1*1145, DRB1*1146, DRB1*1147, DRB1*1148, DRB1*1149, DRB1*1150, DRB1*1151, DRB1*1152, DRB1*1153, DRB1*115401, DRB1*115402, DRB1*1155, DRB1*1156, DRB1*1157, DRB1*1158, DRB1*1159, DRB1*1160, DRB1*1161, DRB1*1162, DRB1*1163, DRB1*1164, DRB1*116501, DRB1*116502, DRB1*1166, DRB1*1167, DRB1*1168, DRB1*1169, DRB1*1170, DRB1*1172, DRB1*1173, DRB1*1174, DRB1*1175, DRB1*1176, DRB1*1177, DRB1*1178, DRB1*1179, DRB1*1180, DRB1*1181, DRB1*120101, DRB1*120102, DRB1*120201, DRB1*120202, DRB1*120203, DRB1*120204, DRB1*120302, DRB1*1204, DRB1*1205, DRB1*1206, DRB1*1207, DRB1*1208, DRB1*1209, DRB1*1210, DRB1*1211, DRB1*1212, DRB1*1213, DRB1*1214, DRB1*1215, DRB1*1216, DRB1*1217, DRB1*1218, DRB1*1219, DRB1*130101, DRB1*130102, DRB1*130103, DRB1*130104, DRB1*130105, DRB1*130201, DRB1*130202, DRB1*130203, DRB1*130301, DRB1*130302, DRB1*1304, DRB1*130501, DRB1*130502, DRB1*1306, DRB1*130701, DRB1*130702, DRB1*1308, DRB1*1309, DRB1*1310, DRB1*131101, DRB1*131102, DRB1*1312, DRB1*1313, DRB1*131401, DRB1*131402, DRB1*131403, DRB1*1315, DRB1*1316, DRB1*1317, DRB1*1318, DRB1*1319, DRB1*1320, DRB1*1321, DRB1*1322, DRB1*1323, DRB1*1324, DRB1*1325, DRB1*1326, DRB1*1327, DRB1*1328, DRB1*1329, DRB1*1330, DRB1*1331, DRB1*1332, DRB1*133301, DRB1*133302, DRB1*133303, DRB1*1334, DRB1*1335, DRB1*1336, DRB1*1337, DRB1*1338, DRB1*1339, DRB1*1340, DRB1*1341, DRB1*1342, DRB1*1343, DRB1*1344, DRB1*1345, DRB1*1346, DRB1*1347, DRB1*1348, DRB1*1349, DRB1*135001, DRB1*135002, DRB1*1351, DRB1*1352, DRB1*1353, DRB1*1354, DRB1*1355, DRB1*1356, DRB1*1357, DRB1*1358, DRB1*1359, DRB1*1360, DRB1*1361, DRB1*1362, DRB1*1363, DRB1*1364, DRB1*1365, DRB1*1366, DRB1*1367, DRB1*1368, DRB1*1369, DRB1*1370, DRB1*1371, DRB1*1372, DRB1*1373, DRB1*1374, DRB1*1375, DRB1*1376, DRB1*1377, DRB1*1378, DRB1*1379, DRB1*1380, DRB1*1381, DRB1*1382, DRB1*1383, DRB1*1384, DRB1*1385, DRB1*1386, DRB1*1387, DRB1*1388, DRB1*1389, DRB1*1390, DRB1*1391, DRB1*1392, DRB1*140101, DRB1*140102, DRB1*140103, DRB1*1402, DRB1*140301, DRB1*140302, DRB1*1404, DRB1*140501, DRB1*140502, DRB1*140503, DRB1*1406, DRB1*140701, DRB1*140702, DRB1*1408, DRB1*1409, DRB1*1410, DRB1*1411, DRB1*1412, DRB1*1413, DRB1*1414, DRB1*1415, DRB1*1416, DRB1*1417, DRB1*1418, DRB1*1419, DRB1*1420, DRB1*1421, DRB1*1422, DRB1*142301, DRB1*142302, DRB1*1424, DRB1*1425, DRB1*1426, DRB1*1427, DRB1*1428, DRB1*1429, DRB1*1430, DRB1*1431, DRB1*143201, DRB1*143202, DRB1*1433, DRB1*1434, DRB1*1435, DRB1*1436, DRB1*1437, DRB1*1438, DRB1*1439, DRB1*1440, DRB1*1441, DRB1*1442, DRB1*1443, DRB1*144401, DRB1*144402, DRB1*1445, DRB1*1446, DRB1*1447, DRB1*1448, DRB1*1449, DRB1*1450, DRB1*1451, DRB1*1452, DRB1*1453, DRB1*1454, DRB1*1455, DRB1*1456, DRB1*1457, DRB1*1458, DRB1*1459, DRB1*1460, DRB1*1461, DRB1*1462, DRB1*1463, DRB1*1464, DRB1*1465, DRB1*1467, DRB1*1468, DRB1*1469, DRB1*1470, DRB1*1471, DRB1*1472, DRB1*1473, DRB1*1474, DRB1*1475, DRB1*1476, DRB1*1477, DRB1*1478, DRB1*1479, DRB1*1480, DRB1*1481, DRB1*1482, DRB1*1483, DRB1*1484, DRB1*1485, DRB1*1486, DRB1*1487, DRB1*1488, DRB1*1489, DRB1*1490, DRB1*15010101, DRB1*15010102, DRB1*150102, DRB1*150103, DRB1*150104, DRB1*150105, DRB1*150106, DRB1*150201, DRB1*150202, DRB1*150203, DRB1*150204, DRB1*150205, DRB1*150206, DRB1*15030101, DRB1*15030102, DRB1*1504, DRB1*1505, DRB1*1506, DRB1*1507, DRB1*1508, DRB1*1509, DRB1*1510, DRB1*1511, DRB1*1512, DRB1*1513, DRB1*1514, DRB1*1515, DRB1*1516, DRB1*1517N, DRB1*1518, DRB1*1519, DRB1*1520, DRB1*1521, DRB1*1522, DRB1*1523, DRB1*1524, DRB1*1525, DRB1*1526, DRB1*1527, DRB1*1528, DRB1*1529, DRB1*1530, DRB1*1531, DRB1*1532, DRB1*1533, DRB1*160101, DRB1*160102, DRB1*160201, DRB1*160202, DRB1*1603, DRB1*1604, DRB1*160501, DRB1*160502, DRB1*1607, DRB1*1608, DRB1*1609, DRB1*1610, DRB1*1611, DRB1*1612, and DRB1*1613N.

1210. The composition according to any of the claims 1-1209, wherein the one or more biologically active molecules can be selected from the group of biologically active molecules consisting of HLA-DRB2-9, DRB2*0101, DRB3*01010201, DRB3*01010202, DRB3*010103, DRB3*010104, DRB3*010105, DRB3*0102, DRB3*0103, DRB3*0104, DRB3*0105, DRB3*0106, DRB3*0107, DRB3*0108, DRB3*0109, DRB3*0110, DRB3*0111, DRB3*0112, DRB3*0113, DRB3*0201, DRB3*020201, DRB3*020202, DRB3*020203, DRB3*020204, DRB3*020205, DRB3*0203, DRB3*0204, DRB3*0205, DRB3*0206, DRB3*0207, DRB3*0208, DRB3*0209, DRB3*0210, DRB3*0211, DRB3*0212, DRB3*0213, DRB3*0214, DRB3*0215, DRB3*0216, DRB3*0217, DRB3*0218, DRB3*0219, DRB3*0220, DRB3*0221, DRB3*0222, DRB3*0223, DRB3*0224, DRB3*030101, DRB3*030102, DRB3*030103, DRB3*0302, DRB3*0303, DRB4*01010101, DRB4*0102, DRB4*01030101, DRB4*01030102N, DRB4*010302, DRB4*010303, DRB4*010304, DRB4*0104, DRB4*0105, DRB4*0106, DRB4*0107, DRB4*0201N, DRB4*0301N, DRB5*010101, DRB5*010102, DRB5*0102, DRB5*0103, DRB5*0104, DRB5*0105, DRB5*0106, DRB5*0107, DRB5*0108N, DRB5*0109, DRB5*0110N, DRB5*0111, DRB5*0112, DRB5*0113, DRB5*0202, DRB5*0203, DRB5*0204, DRB5*0205, DRB6*0101, DRB6*0201, DRB6*0202, DRB7*010101, DRB7*010102, DRB8*0101, and DRB9*0101.

1211. The composition according to any of the claims 1-1210, wherein the one or more biologically active molecules can be selected from the group of biologically active molecules consisting of HLA-DQA1, DQA1*010101, DQA1*010102, DQA1*010201, DQA1*010202, DQA1*010203, DQA1*010204, DQA1*0103, DQA1*010401, DQA1*010402, DQA1*0105, DQA1*0106, DQA1*0107, DQA1*0201, DQA1*030101, DQA1*0302, DQA1*0303, DQA1*040101, DQA1*040102, DQA1*0402, DQA1*0403N, DQA1*0404, DQA1*050101, DQA1*050102, DQA1*0502, DQA1*0503, DQA1*0504, DQA1*0505, DQA1*0506, DQA1*0507, DQA1*0508, DQA1*0509, DQA1*060101, DQA1*060102, and DQA1*0602.

1212. The composition according to any of the claims 1-1211, wherein the one or more biologically active molecules can be selected from the group of biologically active molecules consisting of HLA-DQB1, DQB1*050101, DQB1*050102, DQB1*050201, DQB1*050202, DQB1*050301, DQB1*050302, DQB1*0504, DQB1*0505, DQB1*020101, DQB1*020102, DQB1*0202, DQB1*0203, DQB1*0204, DQB1*0205, DQB1*030101, DQB1*030102, DQB1*030103, DQB1*030104, DQB1*030201, DQB1*030202, DQB1*030203, DQB1*030204, DQB1*030302, DQB1*030303, DQB1*0304, DQB1*030501, DQB1*030502, DQB1*030503, DQB1*030504, DQB1*0306, DQB1*0307, DQB1*0308, DQB1*0309, DQB1*0310, DQB1*0311, DQB1*0312, DQB1*0313, DQB1*0314, DQB1*0315, DQB1*0316, DQB1*0317, DQB1*0318, DQB1*0319, DQB1*0320, DQB1*0321, DQB1*0322, DQB1*0323, DQB1*0324, DQB1*0325, DQB1*040101, DQB1*040102, DQB1*0402, DQB1*0403, DQB1*060101, DQB1*060102, DQB1*060103, DQB1*060104, DQB1*060201, DQB1*060202, DQB1*060301, DQB1*060302, DQB1*060401, DQB1*060402, DQB1*060403, DQB1*060501, DQB1*060502, DQB1*0606, DQB1*0607, DQB1*060801, DQB1*060802, DQB1*0609, DQB1*0610, DQB1*061101, DQB1*061102, DQB1*0612, DQB1*0613, DQB1*061401, DQB1*061402, DQB1*0615, DQB1*0616, DQB1*0617, DQB1*0618, DQB1*0619, DQB1*0620, DQB1*0621, DQB1*0622, DQB1*0623, DQB1*0624, DQB1*0625, DQB1*0626N, DQB1*0627, DQB1*0628, DQB1*0629, DQB1*0630, DQB1*0631, DQB1*0632, DQB1*0633, DQB1*0634, and DQB1*0635.

1213. The composition according to any of the claims 1-1212, wherein the one or more biologically active molecules can be selected from the group of biologically active molecules consisting of HLA-DPA1, DPA1*010301, DPA1*010302, DPA1*010303, DPA1*010304, DPA1*0104, DPA1*0105, DPA1*010601, DPA1*010602, DPA1*0107, DPA1*0108, DPA1*0109, DPA1*0110, DPA1*020101, DPA1*020102, DPA1*020103, DPA1*020104, DPA1*020105, DPA1*020106, DPA1*020201, DPA1*020202, DPA1*020203 DPA1*0203, DPA1*0204, DPA1*0301, DPA1*0302, DPA1*0303, and DPA1*0401.

1214. The composition according to any of the claims 1-1213, wherein the one or more biologically active molecules can be selected from the group of biologically active molecules consisting of HLA-DPB1, DPB1*010101, DPB1*010102, DPB1*010103, DPB1*0102, DPB1*020102, DPB1*020103, DPB1*020104, DPB1*020105, DPB1*020106, DPB1*020107, DPB1*0202, DPB1*0203, DPB1*030101, DPB1*030102, DPB1*0302, DPB1*040101, DPB1*040102, DPB1*0402, DPB1*0403, DPB1*050101, DPB1*050102, DPB1*0502, DPB1*0601, DPB1*0602, DPB1*0801, DPB1*0802, DPB1*0901, DPB1*0902, DPB1*1001, DPB1*1002, DPB1*110101, DPB1*110102, DPB1*1102, DPB1*1301, DPB1*1302, DPB1*1401, DPB1*1402, DPB1*1501, DPB1*1502, DPB1*1601, DPB1*1602, DPB1*1701, DPB1*1702, DPB1*1801, DPB1*1802, DPB1*1901, DPB1*1902, DPB1*200101, DPB1*200102, DPB1*2002, DPB1*2101, DPB1*2102, DPB1*2201, DPB1*2202, DPB1*2301, DPB1*2302N, DPB1*2401, DPB1*2402, DPB1*2501, DPB1*2502, DPB1*260101, DPB1*260102, DPB1*2602, DPB1*2701, DPB1*2801, DPB1*2901, DPB1*3001, DPB1*3101, DPB1*3201, DPB1*3301, DPB1*3401, DPB1*3501, DPB1*3601, DPB1*3701, DPB1*3801, DPB1*3901, DPB1*4001, DPB1*410101, DPB1*410102, DPB1*4401, DPB1*4501, DPB1*4601, DPB1*4701, DPB1*4801, DPB1*4901, DPB1*5001, DPB1*5101, DPB1*5201, DPB1*5301, DPB1*5401, DPB1*5501, DPB1*5601, DPB1*5701, DPB1*5801, DPB1*5901, DPB1*6001, DPB1*6101N, DPB1*6201, DPB1*6301, DPB1*6401N, DPB1*6501, DPB1*6601, DPB1*6701, DPB1*6801, DPB1*6901, DPB1*7001, DPB1*7101, DPB1*7201, DPB1*7301, DPB1*7401, DPB1*7501, DPB1*7601, DPB1*7701, DPB1*7801, DPB1*7901, DPB1*8001, DPB1*8101, DPB1*8201, DPB1*8301, DPB1*8401, DPB1*8501, DPB1*8601, DPB1*8701, DPB1*8801, DPB1*8901, DPB1*9001, DPB1*9101, DPB1*9201, DPB1*9301, DPB1*9401, DPB1*9501, DPB1*9601, DPB1*9701, DPB1*9801, and DPB1*9901.

1215. The composition according to any of claims 1-1214, wherein one or more of the pharmamers comprises the biologically active molecule HSP 70.

1216. The composition according to any of claims 1-1215, wherein one or more of the pharmamers do not comprise the biologically active molecule HSP 70.

1217. The composition according to any of claims 1-1216, wherein one or more of the pharmamers comprises DR*04.

1218. The composition according to any of claims 1-1216, wherein one or more of the pharmamers do not comprises DR*04.

1219. The composition according to any of claims 1-1218, wherein one or more of the pharmamers comprises gp140.

1220. The composition according to any of claims 1-1218, wherein one or more of the pharmamers do not comprise gp140.

1221. The composition according to any of claims 1-1220, wherein one or more of the pharmamers comprises and/or the composition comprises TiterMax® Gold.

1222. The composition according to any of claims 1-1220, wherein one or more of the pharmamers do not comprise and/or the composition do not comprise TiterMax® Gold.

1223. The composition according to any of claims 1-1222, wherein one or more of the pharmamers comprises and/or the composition comprises Aluminiumhydroxide gel or Alhydrogel.

1224. The composition according to any of claims 1-1222, wherein one or more of the pharmamers do not comprise and/or the composition do not comprise Aluminiumhydroxide gel or Alhydrogel.

1225. The composition according to any of claims 1-1224, wherein the composition comprises a pharmamer with two different biologically active molecules.

1226. The composition according to any of claims 1-1225, wherein the composition comprises a pharmamer with two different biologically active molecules, termed A and B, wherein the molar ratio between A and B can be selected from the group consisting of 1:1, 1:2, 1:3, 1:4, 1:5, 1:6, 1:7, 1:8, 1:9, 1:10, 1:11, 1:12, 1:13, 1:14, 1:15, 1:16, 1:17, 1:18, 1:19, 1:20, 1:21, 1:22, 1:23, 1:24, 1:25, 1:26, 1:27, 1:28, 1:29, 1:30, 1:31, 1:32, 1:33, 1:34, 1:35, 1:36, 1:37, 1:38, 1:39, 1:40, 1:41, 1:42, 1:43, 1:44, 1:45, 1:46, 1:47, 1:48, 1:49, and 1:50.

1227. The composition according to any of claims 1-1226, wherein the composition does not comprises a pharmamer with two different biologically active molecules, termed A and B, wherein the molar ratio between A and B can be selected from the group consisting of 1:1, 1:2, 1:3, 1:4, 1:5, 1:6, 1:7, 1:8, 1:9, 1:10, 1:11, 1:12, 1:13, 1:14, 1:15, 1:16, 1:17, 1:18, 1:19, 1:20, 1:21, 1:22, 1:23, 1:24, 1:25, 1:26, 1:27, 1:28, 1:29, 1:30, 1:31, 1:32, 1:33, 1:34, 1:35, 1:36, 1:37, 1:38, 1:39, 1:40, 1:41, 1:42, 1:43, 1:44, 1:45, 1:46, 1:47, 1:48, 1:49, and 1:50.

1228. The composition according to any of claims 1-1227, wherein the composition comprises a pharmamer with two different biologically active molecules, termed A and B, wherein the molar ratio between A and B can be selected from the group consisting of 1:0.1-0.5, 1:0.5-1, 1:1-2, 1:2-3, 1:3-4, 1:4-5, 1:5-6, 1:6-7, 1:7-8, 1:8-9, 1:9-10, 1:10-11, 1:11-12, 1:12-13, 1:13-14, 1:14-15, 1:15-16, 1:16-17, 1:17-18, 1:18-19, 1:19-20, 1:21-22, 1:22-23, 1:23-24, 1:24-25, 1:25-26, 1:26-27, 1:27-28, 1:28-29, 1:29-30, 1:30-35, 1:35-40, 1:40-45, and 1:45-50.

1229. The composition according to any of claims 1-1228, wherein the composition does not comprises a pharmamer with two different biologically active molecules, termed A and B, wherein the molar ratio between A and B can be selected from the group consisting of 1:0.1-0.5, 1:0.5-1, 1:1-2, 1:2-3, 1:3-4, 1:4-5, 1:5-6, 1:6-7, 1:7-8, 1:8-9, 1:9-10, 1:10-11, 1:11-12, 1:12-13, 1:13-14, 1:14-15, 1:15-16, 1:16-17, 1:17-18, 1:18-19, 1:19-20, 1:21-22, 1:22-23, 1:23-24, 1:24-25, 1:25-26, 1:26-27, 1:27-28, 1:28-29, 1:29-30, 1:30-35, 1:35-40, 1:40-45, and 1:45-50.

1230. The composition according to any of claims 1-1229, wherein the composition comprises a pharmamer with three different biologically active molecules, termed A, B, and C wherein the molar ratio between A, B and C (A:B:C) can be selected from the group consisting of 1:1:1, 1:2:1, 1:3:1, 1:4:1, 1:6:1, 1:7:1, 1:8:1, 1:9:1, 1:10:1, 1:11:1, 1:12:1, 1:13:1, 1:14:1, 1:15:1, 1:16:1, 1:17:1, 1:18:1, 1:19:1, 1:20:1, 1:21:1, 1:22:1, 1:23:1, 1:24:1, 1:25:1, 1:26:1, 1:27:1, 1:28:1, 1:29:1, 1:30:1, 1:31:1, 1:32:1, 1:33:1, 1:34:1, 1:35:1, 1:36:1, 1:37:1, 1:38:1, 1:39:1, 1:40:1, 1:41:1, 1:42:1, 1:43:1, 1:44:1, 1:45:1, 1:46:1, 1:47:1, 1:48:1, and 1:49:1, and 1:50:1.

1231. The composition according to any of claims 1-1230, wherein the composition comprises a pharmamer with three different biologically active molecules, termed A, B, and C wherein the molar ratio between A, B and C (A:B:C) can be selected from the group consisting of 1:1:1, 1:2:1, 1:3:1, 1:4:1, 1:5:1, 1:6:1, 1:7:1, 1:8:1, 1:9:1, 1:10:1, 1:11:1, 1:12:1, 1:13:1, 1:14:1, 1:15:1, 1:16:1, 1:17:1, 1:18:1, 1:19:1, 1:20:1, 1:21:1, 1:22:1, 1:23:1, 1:24:1, 1:25:1, 1:26:1, 1:27:1, 1:28:1, 1:29:1, 1:30:1, 1:31:1, 1:32:1, 1:33:1, 1:34:1, 1:35:1, 1:36:1, 1:37:1, 1:38:1, 1:39:1, 1:40:1, 1:41:1, 1:42:1, 1:43:1, 1:44:1, 1:45:1, 1:46:1, 1:47:1, 1:48:1, and 1:49:1, and 1:50:1.

1232. The composition according to any of claims 1-1231, wherein the composition does not comprise a pharmamer with three different biologically active molecules, termed A, B, and C wherein the molar ratio between A, B and C (A:B:C) can be selected from the group consisting of 1:1:1, 1:2:1, 1:3:1, 1:4:1, 1:5:1, 1:6:1, 1:7:1, 1:8:1, 1:9:1, 1:10:1, 1:11:1, 1:12:1, 1:13:1, 1:14:1, 1:15:1, 1:16:1, 1:17:1, 1:18:1, 1:19:1, 1:20:1, 1:21:1, 1:22:1, 1:23:1, 1:24:1, 1:25:1, 1:26:1, 1:27:1, 1:28:1, 1:29:1, 1:30:1, 1:31:1, 1:32:1, 1:33:1, 1:34:1, 1:35:1, 1:36:1, 1:37:1, 1:38:1, 1:39:1, 1:40:1, 1:41:1, 1:42:1, 1:43:1, 1:44:1, 1:45:1, 1:46:1, 1:47:1, 1:48:1, and 1:49:1, and 1:50:1.

1233. The composition according to any of claims 1-1232, wherein the composition comprises a pharmamer consisting of a multimerization domain and two different biologically active molecules, termed A, and B.

1234. The composition according to any of claims 1-1233, wherein the composition comprises a pharmamer consisting of a multimerization domain and three different biologically active molecules, termed A, B, and C.

1235. The composition according to any of claims 1-1234, wherein the composition comprises a pharmamer consisting of a multimerization domain and four different biologically active molecules, termed A, B, C, and D.

1236. The composition according to any of claims 1-1235, wherein the composition comprises a pharmamer consisting of a multimerization domain and five different biologically active molecules, termed A, B, C, D and E.

1237. The composition according to any of claims 1-1236, wherein the composition comprises a pharmamer consisting of a multimerization domain and six different biologically active molecules, termed A, B, C, D, E and F.

1238. The composition according to any of claims 1-1237, wherein the composition comprises a pharmamer consisting of a multimerization domain and seven different biologically active molecules, termed A, B, C, D, E, F, and G.

1239. The composition according to any of claims 1233-1238, wherein the molar ratio between the multimerization domain and the biologically active molecule A (molar multimerization domain:molar biologically active molecule A) can be selected from the group consisting of 1:1, 1:2, 1:3, 1:4, 1:5, 1:6, 1:7, 1:8, 1:9, 1:10, 1:11, 1:12, 1:13, 1:14, 1:15, 1:16, 1:17, 1:18, 1:19, 1:20, 1:21, 1:22, 1:23, 1:24, 1:25, 1:26, 1:27, 1:28, 1:29, 1:30, 1:31, 1:32, 1:33, 1:34, 1:35, 1:36, 1:37, 1:38, 1:39, 1:40, 1:41, 1:42, 1:43, 1:44, 1:45, 1:46, 1:47, 1:48, 1:49, and 1:50 and any ranges combined by these ratios.

1240. The composition according to any of claims 1233-1239, wherein the molar ratio between the multimerization domain and the biologically active molecule A (molar multimerization domain:molar biologically active molecule A) is different from one or more of the following ratios 1:1, 1:2, 1:3, 1:4, 1:5, 1:6, 1:7, 1:8, 1:9, 1:10, 1:11, 1:12, 1:13, 1:14, 1:15, 1:16, 1:17, 1:18, 1:19, 1:20, 1:21, 1:22, 1:23, 1:24, 1:25, 1:26, 1:27, 1:28, 1:29, 1:30, 1:31, 1:32, 1:33, 1:34, 1:35, 1:36, 1:37, 1:38, 1:39, 1:40, 1:41, 1:42, 1:43, 1:44, 1:45, 1:46, 1:47, 1:48, 1:49, and 1:50 and any ranges combined by these ratios.

1241. The composition according to any of claims 1233-1240, wherein the molar ratio between the multimerization domain and the biologically active molecule B (molar multimerization domain:molar biologically active molecule B) can be selected from the group consisting of 1:1, 1:2, 1:3, 1:4, 1:5, 1:6, 1:7, 1:8, 1:9, 1:10, 1:11, 1:12, 1:13, 1:14, 1:15, 1:16, 1:17, 1:18, 1:19, 1:20, 1:21, 1:22, 1:23, 1:24, 1:25, 1:26, 1:27, 1:28, 1:29, 1:30, 1:31, 1:32, 1:33, 1:34, 1:35, 1:36, 1:37, 1:38, 1:39, 1:40, 1:41, 1:42, 1:43, 1:44, 1:45, 1:46, 1:47, 1:48, 1:49, and 1:50 and any ranges combined by these ratios.

1242. The composition according to any of claims 1233-1240, wherein the molar ratio between the multimerization domain and the biologically active molecule B (molar multimerization domain:molar biologically active molecule B) is different from one or more of the following ratios 1:1, 1:2, 1:3, 1:4, 1:5, 1:6, 1:7, 1:8, 1:9, 1:10, 1:11, 1:12, 1:13, 1:14, 1:15, 1:16, 1:17, 1:18, 1:19, 1:20, 1:21, 1:22, 1:23, 1:24, 1:25, 1:26, 1:27, 1:28, 1:29, 1:30, 1:31, 1:32, 1:33, 1:34, 1:35, 1:36, 1:37, 1:38, 1:39, 1:40, 1:41, 1:42, 1:43, 1:44, 1:45, 1:46, 1:47, 1:48, 1:49, and 1:50 and any ranges combined by these ratios.

1243. The composition according to any of claims 1234-1242, wherein the molar ratio between the multimerization domain and the biologically active molecule C (molar multimerization domain:molar biologically active molecule C) can be selected from the group consisting of 1:1, 1:2, 1:3, 1:4, 1:5, 1:6, 1:7, 1:8, 1:9, 1:10, 1:11, 1:12, 1:13, 1:14, 1:15, 1:16, 1:17, 1:18, 1:19, 1:20, 1:21, 1:22, 1:23, 1:24, 1:25, 1:26, 1:27, 1:28, 1:29, 1:30, 1:31, 1:32, 1:33, 1:34, 1:35, 1:36, 1:37, 1:38, 1:39, 1:40, 1:41, 1:42, 1:43, 1:44, 1:45, 1:46, 1:47, 1:48, 1:49, and 1:50 and any ranges combined by these ratios.

1244. The composition according to any of claims 1234-1242, wherein the molar ratio between the multimerization domain and the biologically active molecule C (molar multimerization domain:molar biologically active molecule C) is different from one or more of the following ratios 1:1, 1:2, 1:3, 1:4, 1:5, 1:6, 1:7, 1:8, 1:9, 1:10, 1:11, 1:12, 1:13, 1:14, 1:15, 1:16, 1:17, 1:18, 1:19, 1:20, 1:21, 1:22, 1:23, 1:24, 1:25, 1:26, 1:27, 1:28, 1:29, 1:30, 1:31, 1:32, 1:33, 1:34, 1:35, 1:36, 1:37, 1:38, 1:39, 1:40, 1:41, 1:42, 1:43, 1:44, 1:45, 1:46, 1:47, 1:48, 1:49, and 1:50 and any ranges combined by these ratios.

1245. The composition according to any of claims 1235-1244, wherein the molar ratio between the multimerization domain and the biologically active molecule D (molar multimerization domain:molar biologically active molecule D) can be selected from the group consisting of 1:1, 1:2, 1:3, 1:4, 1:5, 1:6, 1:7, 1:8, 1:9, 1:10, 1:11, 1:12, 1:13, 1:14, 1:15, 1:16, 1:17, 1:18, 1:19, 1:20, 1:21, 1:22, 1:23, 1:24, 1:25, 1:26, 1:27, 1:28, 1:29, 1:30, 1:31, 1:32, 1:33, 1:34, 1:35, 1:36, 1:37, 1:38, 1:39, 1:40, 1:41, 1:42, 1:43, 1:44, 1:45, 1:46, 1:47, 1:48, 1:49, and 1:50 and any ranges combined by these ratios.

1246. The composition according to any of claims 1235-1244, wherein the molar ratio between the multimerization domain and the biologically active molecule D (molar multimerization domain:molar biologically active molecule D) is different from one or more of the following ratios 1:1, 1:2, 1:3, 1:4, 1:5, 1:6, 1:7, 1:8, 1:9, 1:10, 1:11, 1:12, 1:13, 1:14, 1:15, 1:16, 1:17, 1:18, 1:19, 1:20, 1:21, 1:22, 1:23, 1:24, 1:25, 1:26, 1:27, 1:28, 1:29, 1:30, 1:31, 1:32, 1:33, 1:34, 1:35, 1:36, 1:37, 1:38, 1:39, 1:40, 1:41, 1:42, 1:43, 1:44, 1:45, 1:46, 1:47, 1:48, 1:49, and 1:50 and any ranges combined by these ratios.

1247. The composition according to any of claims 1236-1246, wherein the molar ratio between the multimerization domain and the biologically active molecule E (molar multimerization domain:molar biologically active molecule E) can be selected from the group consisting of 1:1, 1:2, 1:3, 1:4, 1:5, 1:6, 1:7, 1:8, 1:9, 1:10, 1:11, 1:12, 1:13, 1:14, 1:15, 1:16, 1:17, 1:18, 1:19, 1:20, 1:21, 1:22, 1:23, 1:24, 1:25, 1:26, 1:27, 1:28, 1:29, 1:30, 1:31, 1:32, 1:33, 1:34, 1:35, 1:36, 1:37, 1:38, 1:39, 1:40, 1:41, 1:42, 1:43, 1:44, 1:45, 1:46, 1:47, 1:48, 1:49, and 1:50 and any ranges combined by these ratios.

1248. The composition according to any of claims 1236-1246, wherein the molar ratio between the multimerization domain and the biologically active molecule E (molar multimerization domain:molar biologically active molecule E) is different from one or more of the following ratios 1:1, 1:2, 1:3, 1:4, 1:5, 1:6, 1:7, 1:8, 1:9, 1:10, 1:11, 1:12, 1:13, 1:14, 1:15, 1:16, 1:17, 1:18, 1:19, 1:20, 1:21, 1:22, 1:23, 1:24, 1:25, 1:26, 1:27, 1:28, 1:29, 1:30, 1:31, 1:32, 1:33, 1:34, 1:35, 1:36, 1:37, 1:38, 1:39, 1:40, 1:41, 1:42, 1:43, 1:44, 1:45, 1:46, 1:47, 1:48, 1:49, and 1:50 and any ranges combined by these ratios.

1249. The composition according to any of claims 1237-1248, wherein the molar ratio between the multimerization domain and the biologically active molecule F (molar multimerization domain:molar biologically active molecule F) can be selected from the group consisting of 1:1, 1:2, 1:3, 1:4, 1:5, 1:6, 1:7, 1:8, 1:9, 1:10, 1:11, 1:12, 1:13, 1:14, 1:15, 1:16, 1:17, 1:18, 1:19, 1:20, 1:21, 1:22, 1:23, 1:24, 1:25, 1:26, 1:27, 1:28, 1:29, 1:30, 1:31, 1:32, 1:33, 1:34, 1:35, 1:36, 1:37, 1:38, 1:39, 1:40, 1:41, 1:42, 1:43, 1:44, 1:45, 1:46, 1:47, 1:48, 1:49, and 1:50 and any ranges combined by these ratios.

1250. The composition according to any of claims 1237-1248, wherein the molar ratio between the multimerization domain and the biologically active molecule F (molar multimerization domain:molar biologically active molecule F) is different from one or more of the following ratios 1:1, 1:2, 1:3, 1:4, 1:5, 1:6, 1:7, 1:8, 1:9, 1:10, 1:11, 1:12, 1:13, 1:14, 1:15, 1:16, 1:17, 1:18, 1:19, 1:20, 1:21, 1:22, 1:23, 1:24, 1:25, 1:26, 1:27, 1:28, 1:29, 1:30, 1:31, 1:32, 1:33, 1:34, 1:35, 1:36, 1:37, 1:38, 1:39, 1:40, 1:41, 1:42, 1:43, 1:44, 1:45, 1:46, 1:47, 1:48, 1:49, and 1:50 and any ranges combined by these ratios.

1251. The composition according to any of claims 1238-1250, wherein the molar ratio between the multimerization domain and the biologically active molecule G (molar multimerization domain:molar biologically active molecule G) can be selected from the group consisting of 1:1, 1:2, 1:3, 1:4, 1:5, 1:6, 1:7, 1:8, 1:9, 1:10, 1:11, 1:12, 1:13, 1:14, 1:15, 1:16, 1:17, 1:18, 1:19, 1:20, 1:21, 1:22, 1:23, 1:24, 1:25, 1:26, 1:27, 1:28, 1:29, 1:30, 1:31, 1:32, 1:33, 1:34, 1:35, 1:36, 1:37, 1:38, 1:39, 1:40, 1:41, 1:42, 1:43, 1:44, 1:45, 1:46, 1:47, 1:48, 1:49, and 1:50 and any ranges combined by these ratios.

1252. The composition according to any of claims 1238-1250, wherein the molar ratio between the multimerization domain and the biologically active molecule G (molar multimerization domain:molar biologically active molecule G) is different from one or more of the following ratios 1:1, 1:2, 1:3, 1:4, 1:5, 1:6, 1:7, 1:8, 1:9, 1:10, 1:11, 1:12, 1:13, 1:14, 1:15, 1:16, 1:17, 1:18, 1:19, 1:20, 1:21, 1:22, 1:23, 1:24, 1:25, 1:26, 1:27, 1:28, 1:29, 1:30, 1:31, 1:32, 1:33, 1:34, 1:35, 1:36, 1:37, 1:38, 1:39, 1:40, 1:41, 1:42, 1:43, 1:44, 1:45, 1:46, 1:47, 1:48, 1:49, and 1:50 and any ranges combined by these ratios.

1253. The composition according to any of claims 1-1252, wherein the composition comprises two different pharmamers, wherein the first pharmamer can be any pharmamer according to any of claims 1-1252, and wherein the second pharmamer can be any pharmamer according to any of claims 1-1252.

1254. The composition according to any of claims 1-1252, wherein the composition comprises three different pharmamers, wherein the first pharmamer can be any pharmamer according to any of claims 1-1252, wherein the second pharmamer can be any pharmamer according to any of claims 1-1252, and wherein the third pharmamer can be any pharmamer according to any of claims 1-1252.

1255. The composition according to any of claims 1-1252, wherein the composition comprises four different pharmamers, wherein the first pharmamer can be any pharmamer according to any of claims 1-1252, wherein the second pharmamer can be any pharmamer according to any of claims 1-1252, wherein the third pharmamer can be any pharmamer according to any of claims 1-1252, and wherein the fourth pharmamer can be any pharmamer according to any of the claims 1-1252.

1256. The composition according to any of claims 1-1252, wherein the composition comprises four different pharmamers, wherein the first pharmamer can be any pharmamer according to any of claims 1-1252, wherein the second pharmamer can be any pharmamer according to any of claims 1-1252, wherein the third pharmamer can be any pharmamer according to any of claims 1-1252, wherein the fourth pharmamer can be any pharmamer according to any of the claims 1-1252, and wherein the fifth pharmamer can be any pharmamer according to any of the claims 1-1252.

1257. The composition according to any of the claims 1253-1256, wherein the molar ratio between the first pharmamer and the second pharmamer can be selected from the group consisting of 1:1, 1:2, 1:3, 1:4, 1:5, 1:6, 1:7, 1:8, 1:9, 1:10, 1:11, 1:12, 1:13, 1:14, 1:15, 1:16, 1:17, 1:18, 1:19, 1:20, 1:21, 1:22, 1:23, 1:24, 1:25, 1:26, 1:27, 1:28, 1:29, 1:30, 1:31, 1:32, 1:33, 1:34, 1:35, 1:36, 1:37, 1:38, 1:39, 1:40, 1:41, 1:42, 1:43, 1:44, 1:45, 1:46, 1:47, 1:48, 1:49, and 1:50 and any ranges combined by these ratios.

1258. The composition according to any of the claims 1253-1256, wherein the molar ratio between the first pharmamer and the second pharmamer differs from one or more of the ratios 1:1, 1:2, 1:3, 1:4, 1:5, 1:6, 1:7, 1:8, 1:9, 1:10, 1:11, 1:12, 1:13, 1:14, 1:15, 1:16, 1:17, 1:18, 1:19, 1:20, 1:21, 1:22, 1:23, 1:24, 1:25, 1:26, 1:27, 1:28, 1:29, 1:30, 1:31, 1:32, 1:33, 1:34, 1:35, 1:36, 1:37, 1:38, 1:39, 1:40, 1:41, 1:42, 1:43, 1:44, 1:45, 1:46, 1:47, 1:48, 1:49, and 1:50 and any ranges combined by these ratios.

1259. The composition according to any of the claims 1253-1258, wherein the molar ratio between the first pharmamer and the third pharmamer can be selected from the group consisting of 1:1, 1:2, 1:3, 1:4, 1:5, 1:6, 1:7, 1:8, 1:9, 1:10, 1:11, 1:12, 1:13, 1:14, 1:15, 1:16, 1:17, 1:18, 1:19, 1:20, 1:21, 1:22, 1:23, 1:24, 1:25, 1:26, 1:27, 1:28, 1:29, 1:30, 1:31, 1:32, 1:33, 1:34, 1:35, 1:36, 1:37, 1:38, 1:39, 1:40, 1:41, 1:42, 1:43, 1:44, 1:45, 1:46, 1:47, 1:48, 1:49, and 1:50 and any ranges combined by these ratios.

1260. The composition according to any of the claims 1253-1258, wherein the molar ratio between the first pharmamer and the third pharmamer differs from one or more of the ratios 1:1, 1:2, 1:3, 1:4, 1:5, 1:6, 1:7, 1:8, 1:9, 1:10, 1:11, 1:12, 1:13, 1:14, 1:15, 1:16, 1:17, 1:18, 1:19, 1:20, 1:21, 1:22, 1:23, 1:24, 1:25, 1:26, 1:27, 1:28, 1:29, 1:30, 1:31, 1:32, 1:33, 1:34, 1:35, 1:36, 1:37, 1:38, 1:39, 1:40, 1:41, 1:42, 1:43, 1:44, 1:45, 1:46, 1:47, 1:48, 1:49, and 1:50 and any ranges combined by these ratios.

1261. The composition according to any of the claims 1253-1260, wherein the molar ratio between the first pharmamer and the fourth pharmamer can be selected from the group consisting of 1:1, 1:2, 1:3, 1:4, 1:5, 1:6, 1:7, 1:8, 1:9, 1:10, 1:11, 1:12, 1:13, 1:14, 1:15, 1:16, 1:17, 1:18, 1:19, 1:20, 1:21, 1:22, 1:23, 1:24, 1:25, 1:26, 1:27, 1:28, 1:29, 1:30, 1:31, 1:32, 1:33, 1:34, 1:35, 1:36, 1:37, 1:38, 1:39, 1:40, 1:41, 1:42, 1:43, 1:44, 1:45, 1:46, 1:47, 1:48, 1:49, and 1:50 and any ranges combined by these ratios.

1262. The composition according to any of the claims 1253-1260, wherein the molar ratio between the first pharmamer and the fourth pharmamer differs from one or more of the ratios 1:1, 1:2, 1:3, 1:4, 1:5, 1:6, 1:7, 1:8, 1:9, 1:10, 1:11, 1:12, 1:13, 1:14, 1:15, 1:16, 1:17, 1:18, 1:19, 1:20, 1:21, 1:22, 1:23, 1:24, 1:25, 1:26, 1:27, 1:28, 1:29, 1:30, 1:31, 1:32, 1:33, 1:34, 1:35, 1:36, 1:37, 1:38, 1:39, 1:40, 1:41, 1:42, 1:43, 1:44, 1:45, 1:46, 1:47, 1:48, 1:49, and 1:50 and any ranges combined by these ratios.

1263. The composition according to any of the claims 1253-1262, wherein the molar ratio between the first pharmamer and the fifth pharmamer can be selected from the group consisting of 1:1, 1:2, 1:3, 1:4, 1:5, 1:6, 1:7, 1:8, 1:9, 1:10, 1:11, 1:12, 1:13, 1:14, 1:15, 1:16, 1:17, 1:18, 1:19, 1:20, 1:21, 1:22, 1:23, 1:24, 1:25, 1:26, 1:27, 1:28, 1:29, 1:30, 1:31, 1:32, 1:33, 1:34, 1:35, 1:36, 1:37, 1:38, 1:39, 1:40, 1:41, 1:42, 1:43, 1:44, 1:45, 1:46, 1:47, 1:48, 1:49, and 1:50 and any ranges combined by these ratios.

1264. The composition according to any of the claims 1253-1262, wherein the molar ratio between the first pharmamer and the fifth pharmamer differs from one or more of the ratios 1:1, 1:2, 1:3, 1:4, 1:5, 1:6, 1:7, 1:8, 1:9, 1:10, 1:11, 1:12, 1:13, 1:14, 1:15, 1:16, 1:17, 1:18, 1:19, 1:20, 1:21, 1:22, 1:23, 1:24, 1:25, 1:26, 1:27, 1:28, 1:29, 1:30, 1:31, 1:32, 1:33, 1:34, 1:35, 1:36, 1:37, 1:38, 1:39, 1:40, 1:41, 1:42, 1:43, 1:44, 1:45, 1:46, 1:47, 1:48, 1:49, and 1:50 and any ranges combined by these ratios.

1265. The composition according to any of claims 1-1264, wherein the one or more pharmamers are different.

1266. The composition according to any of claims 1-1265, wherein the one or more pharmamers are identical.

1267. The composition according to any of claims 1-1265, wherein some of the one or more pharmamers are identical and some of the one or more pharmamers are different.

1268. The composition according to any of claims 1-1267 further comprising one or more adjuvants.

1269. The composition according to any of claims 1-1268 further comprising one or more adjuvants that are not linked to the one or more pharmamers.

1270. The composition according to any of claims 1-1269 further comprising one or more adjuvants that are linked to one or more of the one or more pharmamers.

1271. The composition according to any of claims 1-1270 further comprising one or more adjuvants that are linked another component in the composition than the one or more pharmamers.

1272. The composition according to any of claims 1-1271 further comprising one or more adjuvants that are not linked another component in the composition than the one or more pharmamers.

1273. The composition according to any of claims 1266-1272, wherein the one or more adjuvants can be any adjuvant according to any of the previous claims.

1274. The composition according to any of claims 1-1273 further comprising one or more biologically active molecules.

1275. The composition according to any of claims 1-1274 further comprising one or more biologically active molecules that are not linked to the one or more pharmamers.

1276. The composition according to any of claims 1-1275 further comprising one or more biologically active molecules that are linked to one or more of the one or more pharmamers.

1277. The composition according to any of claims 1-1276 further comprising one or more biologically active molecules that are linked another component in the composition than the one or more pharmamers.

1278. The composition according to any of claims 1-1277 further comprising one or more biologically active molecules that are not linked another component in the composition than the one or more pharmamers.

1279. The composition according to any of claims 1266-1278, wherein the one or more biologically active molecules can be any biologically active molecule according to any of the previous claims.

1280. The composition according to any of claims 1-1279 further comprising one or more vaccine enhancers.

1281. The composition according to any of claims 1-1280 further comprising one or more vaccine enhancers that are not linked to the one or more pharmamers.

1282. The composition according to any of claims 1-1281 further comprising one or more vaccine enhancers that are linked to one or more of the one or more pharmamers.

1283. The composition according to any of claims 1-1282 further comprising one or more vaccine enhancers that are linked another component in the composition than the one or more pharmamers.

1284. The composition according to any of claims 1-1283 further comprising one or more vaccine enhancers that are not linked another component in the composition than the one or more pharmamers.

1285. The composition according to any of claims 1280-1284, wherein the one or more vaccine enhancers can be any vaccine enhancers according to any of the previous claims.

1286. The composition according to any of claims 1-1285 further comprising one or more other vaccines.

1287. The composition according to any of claims 1-1286 further comprising one or more other vaccines that are not linked to the one or more pharmamers.

1288. The composition according to any of claims 1-1287 further comprising one or more other vaccines that are linked to one or more of the one or more pharmamers.

1289. The composition according to any of claims 1-1288 further comprising one or more other vaccines that are linked another component in the composition than the one or more pharmamers.

1290. The composition according to any of claims 1-1289 further comprising one or more other vaccines that are not linked another component in the composition than the one or more pharmamers.

1291. The composition according to any of claims 1-1290, wherein the coupling between the multimerization domain and the one or more biologically active molecules is the same type of coupling as the association between the MHC peptide complex and the multimerization domain in the MHC multimer according to claims 92-601.

1292. A method of making the composition according to any of claims 1-1291.

1293. A method for vaccination comprising administration to an individual in need thereof an effective amount of the composition according to any of claims 1-1291.

1294. The method for vaccination according to claim 1293, wherein each dosage unit of said composition comprises in the range of 0.01 to 1 μg, such as in the range of 0.05 to 1 μg, for example in the range of 0.1 to 1 μg, such as in the range of 0.05 to 1 μg, for example in the range of 0.1 to 1 μg, such as in the range of 0.05 to 0.8 μg, for example in the range of 0.05 to 0.6 μg, such as in the range of 0.05 to 0.4 μg, for example in the range of 0.05 to 0.2 μg, such as in the range of 0.1 to 0.8 μg, for example in the range of 0.1 to 0.6 μg, such as in the range of 0.1 to 0.5 μg, for example in the range of 0.1 to 0.4 μg, such as in the range of 0.1 to 0.3 μg, for example in the range of 0.1 to 0.2 μg of pharmamer and/or peptide.

1295. The method for vaccination according to any of claims 1293-1294, wherein the daily dosage of the composition comprises pharmamer in the range from 0.001 to 1,000 mg per adult human/per day, such as from 0.001 to 0.005 mg per adult human/per day, for example from 0.005 to 0.01 mg per adult human/per day, such as from 0.01 to 0.05 mg per adult human/per day, for example from 0.05 to 0.1 mg per adult human/per day, such as from 0.1 to 0.5 mg per adult human/per day, for example from 0.5 to 1 mg per adult human/per day, such as from 1 to 5 mg per adult human/per day, for example from 5 to 10 mg per adult human/per day, such as from 10 to 50 mg per adult human/per day, for example from 50 to 100 mg per adult human/per day, such as from 100 to 500 mg per adult human/per day, for example from 500 to 1000 mg per adult human/per day.

1296. The method for vaccination according to any of claims 1293-1295, wherein the vaccination comprises oral administration of scored or unscored tablets containing e.g. 0.01, 0.05, 0.1, 0.5, 1.0, 2.5, 5.0, 10.0, 15.0, 25.0, or 50.0 milligrams of the active ingredient for the symptomatic adjustment of the dosage to the patient to be treated.

1297. The method for vaccination according to any of claims 1293-1296, wherein the composition is administered at a dosage level of from about 0.0001 mg/kg to about 100 mg/kg of body weight per day, such as from about 0.0001 mg/kg to about 0.0005 mg/kg of body weight per day, for example from about 0.0005 mg/kg to about 0.001 mg/kg of body weight per day, such as from about 0.001 mg/kg to about 0.005 mg/kg of body weight per day, for example from about 0.005 mg/kg to about 0.01 mg/kg of body weight per day, such as from about 0.01 mg/kg to about 0.05 mg/kg of body weight per day, for example from about 0.05 mg/kg to about 0.1 mg/kg of body weight per day, such as from about 0.1 mg/kg to about 0.5 mg/kg of body weight per day, for example from about 0.5 mg/kg to about 1 mg/kg of body weight per day, such as from about 1 mg/kg to about 5 mg/kg of body weight per day, for example from about 5 mg/kg to about 10 mg/kg of body weight per day, such as from about 10 mg/kg to about 50 mg/kg of body weight per day, for example from about 50 mg/kg to about 100 mg/kg of body weight per day.

1298. The method for vaccination according to any of claims 1293-1297, wherein the composition is administered at a dosage level comprising of from about 0.0001 mg/kg to about 100 mg/kg of body weight per day, such as from about 0.0001 mg/kg to about 0.0005 mg/kg of body weight per day, for example from about 0.0005 mg/kg to about 0.001 mg/kg of body weight per day, such as from about 0.001 mg/kg to about 0.005 mg/kg of body weight per day, for example from about 0.005 mg/kg to about 0.01 mg/kg of body weight per day, such as from about 0.01 mg/kg to about 0.05 mg/kg of body weight per day, for example from about 0.05 mg/kg to about 0.1 mg/kg of body weight per day, such as from about 0.1 mg/kg to about 0.5 mg/kg of body weight per day, for example from about 0.5 mg/kg to about 1 mg/kg of body weight per day, such as from about 1 mg/kg to about 5 mg/kg of body weight per day, for example from about 5 mg/kg to about 10 mg/kg of body weight per day, such as from about 10 mg/kg to about 50 mg/kg of body weight per day, for example from about 50 mg/kg to about 100 mg/kg of body weight per day of pharmamer.

1299. The method for vaccination according to any of claims 1293-1298, wherein the composition is administered at a dosage level comprising of from about 0.0001 mg/kg to about 100 mg/kg of body weight per day, such as from about 0.0001 mg/kg to about 0.0005 mg/kg of body weight per day, for example from about 0.0005 mg/kg to about 0.001 mg/kg of body weight per day, such as from about 0.001 mg/kg to about 0.005 mg/kg of body weight per day, for example from about 0.005 mg/kg to about 0.01 mg/kg of body weight per day, such as from about 0.01 mg/kg to about 0.05 mg/kg of body weight per day, for example from about 0.05 mg/kg to about 0.1 mg/kg of body weight per day, such as from about 0.1 mg/kg to about 0.5 mg/kg of body weight per day, for example from about 0.5 mg/kg to about 1 mg/kg of body weight per day, such as from about 1 mg/kg to about 5 mg/kg of body weight per day, for example from about 5 mg/kg to about 10 mg/kg of body weight per day, such as from about 10 mg/kg to about 50 mg/kg of body weight per day, for example from about 50 mg/kg to about 100 mg/kg of body weight per day of peptide(s), The method for vaccination according to any of claims 1293-1082, wherein the composition is administered at a dosage level comprising of from about 0.0001 mg/kg to about 100 mg/kg of body weight per day, such as from about 0.0001 mg/kg to about 0.0005 mg/kg of body weight per day, for example from about 0.0005 mg/kg to about 0.001 mg/kg of body weight per day, such as from about 0.001 mg/kg to about 0.005 mg/kg of body weight per day, for example from about 0.005 mg/kg to about 0.01 mg/kg of body weight per day, such as from about 0.01 mg/kg to about 0.05 mg/kg of body weight per day, for example from about 0.05 mg/kg to about 0.1 mg/kg of body weight per day, such as from about 0.1 mg/kg to about 0.5 mg/kg of body weight per day, for example from about 0.5 mg/kg to about 1 mg/kg of body weight per day, such as from about 1 mg/kg to about 5 mg/kg of body weight per day, for example from about 5 mg/kg to about 10 mg/kg of body weight per day, such as from about 10 mg/kg to about 50 mg/kg of body weight per day, for example from about 50 mg/kg to about 100 mg/kg of body weight per day of biologically active molecule.

1300. The method for vaccination according to any of claims 1293-1299, wherein the composition is administered at a dosage level comprising of from about 0.0001 mg/kg to about 100 mg/kg of body weight per day, such as from about 0.0001 mg/kg to about 0.0005 mg/kg of body weight per day, for example from about 0.0005 mg/kg to about 0.001 mg/kg of body weight per day, such as from about 0.001 mg/kg to about 0.005 mg/kg of body weight per day, for example from about 0.005 mg/kg to about 0.01 mg/kg of body weight per day, such as from about 0.01 mg/kg to about 0.05 mg/kg of body weight per day, for example from about 0.05 mg/kg to about 0.1 mg/kg of body weight per day, such as from about 0.1 mg/kg to about 0.5 mg/kg of body weight per day, for example from about 0.5 mg/kg to about 1 mg/kg of body weight per day, such as from about 1 mg/kg to about 5 mg/kg of body weight per day, for example from about 5 mg/kg to about 10 mg/kg of body weight per day, such as from about 10 mg/kg to about 50 mg/kg of body weight per day, for example from about 50 mg/kg to about 100 mg/kg of body weight per day of adjuvants.

1301. The method for vaccination according to any of claims 1293-1300, wherein the composition is administered at a dosage level comprising of from about 10 μg/kg to about 1500 μg/kg of body weight per administration, such as from about 10 μg/kg to about 30 μg/kg of body weight per administration, such as from about 30 μg/kg to about 50 μg/kg of body weight per administration, such as from about 50 μg/kg to about 70 μg/kg of body weight per administration, such as from about 70 μg/kg to about 90 μg/kg of body weight per administration, such as from about 90 μg/kg to about 110 μg/kg of body weight per administration, such as from about 110 μg/kg to about 130 μg/kg of body weight per administration, such as from about 130 μg/kg to about 150 μg/kg of body weight per administration, such as from about 150 μg/kg to about 170 μg/kg of body weight per administration, such as from about 170 μg/kg to about 190 μg/kg of body weight per administration, such as from about 190 μg/kg to about 210 μg/kg of body weight per administration, such as from about 210 μg/kg to about 230 μg/kg of body weight per administration, such as from about 230 μg/kg to about 250 μg/kg of body weight per administration, such as from about 250 μg/kg to about 270 μg/kg of body weight per administration, such as from about 270 μg/kg to about 290 μg/kg of body weight per administration, such as from about 290 μg/kg to about 310 μg/kg of body weight per administration, such as from about 310 μg/kg to about 330 μg/kg of body weight per administration, such as from about 330 μg/kg to about 350 μg/kg of body weight per administration, such as from about 350 μg/kg to about 370 μg/kg of body weight per administration, such as from about 370 μg/kg to about 390 μg/kg of body weight per administration, such as from about 390 μg/kg to about 410 μg/kg of body weight per administration, such as from about 410 μg/kg to about 430 μg/kg of body weight per administration, such as from about 430 μg/kg to about 450 μg/kg of body weight per administration, such as from about 450 μg/kg to about 470 μg/kg of body weight per administration, such as from about 470 μg/kg to about 490 μg/kg of body weight per administration, such as from about 490 μg/kg to about 510 μg/kg of body weight per administration, such as from about 510 μg/kg to about 530 μg/kg of body weight per administration, such as from about 530 μg/kg to about 550 μg/kg of body weight per administration, such as from about 550 μg/kg to about 570 μg/kg of body weight per administration, such as from about 570 μg/kg to about 590 μg/kg of body weight per administration, such as from about 590 μg/kg to about 610 μg/kg of body weight per administration, such as from about 610 μg/kg to about 630 μg/kg of body weight per administration, such as from about 630 μg/kg to about 650 μg/kg of body weight per administration, such as from about 650 μg/kg to about 670 μg/kg of body weight per administration, such as from about 670 μg/kg to about 690 μg/kg of body weight per administration, such as from about 690 μg/kg to about 710 μg/kg of body weight per administration, such as from about 710 μg/kg to about 730 μg/kg of body weight per administration, such as from about 730 μg/kg to about 750 μg/kg of body weight per administration, such as from about 750 μg/kg to about 770 μg/kg of body weight per administration, such as from about 770 μg/kg to about 790 μg/kg of body weight per administration, such as from about 790 μg/kg to about 810 μg/kg of body weight per administration, such as from about 810 μg/kg to about 830 μg/kg of body weight per administration, such as from about 830 μg/kg to about 850 μg/kg of body weight per administration, such as from about 850 μg/kg to about 870 μg/kg of body weight per administration, such as from about 870 μg/kg to about 890 μg/kg of body weight per administration, such as from about 890 μg/kg to about 910 μg/kg of body weight per administration, such as from about 910 μg/kg to about 930 μg/kg of body weight per administration, such as from about 930 μg/kg to about 950 μg/kg of body weight per administration, such as from about 950 μg/kg to about 970 μg/kg of body weight per administration, such as from about 970 μg/kg to about 990 μg/kg of body weight per administration, such as from about 990 μg/kg to about 1010 μg/kg of body weight per administration, such as from about 1010 μg/kg to about 1030 μg/kg of body weight per administration, such as from about 1030 μg/kg to about 1050 μg/kg of body weight per administration, such as from about 1050 μg/kg to about 1070 μg/kg of body weight per administration, such as from about 1070 μg/kg to about 1090 μg/kg of body weight per administration, such as from about 1090 μg/kg to about 1110 μg/kg of body weight per administration, such as from about 1110 μg/kg to about 1130 μg/kg of body weight per administration, such as from about 1130 μg/kg to about 1150 μg/kg of body weight per administration, such as from about 1150 μg/kg to about 1170 μg/kg of body weight per administration, such as from about 1170 μg/kg to about 1190 μg/kg of body weight per administration, such as from about 1190 μg/kg to about 1210 μg/kg of body weight per administration, such as from about 1210 μg/kg to about 1230 μg/kg of body weight per administration, such as from about 1230 μg/kg to about 1250 μg/kg of body weight per administration, such as from about 1250 μg/kg to about 1270 μg/kg of body weight per administration, such as from about 1270 μg/kg to about 1290 μg/kg of body weight per administration, such as from about 1290 μg/kg to about 1310 μg/kg of body weight per administration, such as from about 1310 μg/kg to about 1330 μg/kg of body weight per administration, such as from about 1330 μg/kg to about 1350 μg/kg of body weight per administration, such as from about 1350 μg/kg to about 1370 μg/kg of body weight per administration, such as from about 1370 μg/kg to about 1390 μg/kg of body weight per administration, such as from about 1390 μg/kg to about 1410 μg/kg of body weight per administration, such as from about 1410 μg/kg to about 1430 μg/kg of body weight per administration, such as from about 1430 μg/kg to about 1450 μg/kg of body weight per administration, such as from about 1450 μg/kg to about 1470 μg/kg of body weight per administration, such as from about 1470 μg/kg to about 1490 μg/kg of body weight per administration, such as from about 1490 μg/kg to about 1500 μg/kg of body weight per administration, or any combination thereof.

1302. The method for vaccination according to any of claims 1293-1301, wherein the composition is not administered at a dosage level selected from the group consisting of from about 10 μg/kg to about 30 μg/kg of body weight per administration, from about 30 μg/kg to about 50 μg/kg of body weight per administration, from about 50 μg/kg to about 70 μg/kg of body weight per administration, from about 70 μg/kg to about 90 μg/kg of body weight per administration, from about 90 μg/kg to about 110 μg/kg of body weight per administration, from about 110 μg/kg to about 130 μg/kg of body weight per administration, from about 130 μg/kg to about 150 μg/kg of body weight per administration, from about 150 μg/kg to about 170 μg/kg of body weight per administration, from about 170 μg/kg to about 190 μg/kg of body weight per administration, from about 190 μg/kg to about 210 μg/kg of body weight per administration, from about 210 μg/kg to about 230 μg/kg of body weight per administration, from about 230 μg/kg to about 250 μg/kg of body weight per administration, from about 250 μg/kg to about 270 μg/kg of body weight per administration, from about 270 μg/kg to about 290 μg/kg of body weight per administration, from about 290 μg/kg to about 310 μg/kg of body weight per administration, from about 310 μg/kg to about 330 μg/kg of body weight per administration, from about 330 μg/kg to about 350 μg/kg of body weight per administration, from about 350 μg/kg to about 370 μg/kg of body weight per administration, from about 370 μg/kg to about 390 μg/kg of body weight per administration, from about 390 μg/kg to about 410 μg/kg of body weight per administration, from about 410 μg/kg to about 430 μg/kg of body weight per administration, from about 430 μg/kg to about 450 μg/kg of body weight per administration, from about 450 μg/kg to about 470 μg/kg of body weight per administration, from about 470 μg/kg to about 490 μg/kg of body weight per administration, from about 490 μg/kg to about 510 μg/kg of body weight per administration, from about 510 μg/kg to about 530 μg/kg of body weight per administration, from about 530 μg/kg to about 550 μg/kg of body weight per administration, from about 550 μg/kg to about 570 μg/kg of body weight per administration, from about 570 μg/kg to about 590 μg/kg of body weight per administration, from about 590 μg/kg to about 610 μg/kg of body weight per administration, from about 610 μg/kg to about 630 μg/kg of body weight per administration, from about 630 μg/kg to about 650 μg/kg of body weight per administration, from about 650 μg/kg to about 670 μg/kg of body weight per administration, from about 670 μg/kg to about 690 μg/kg of body weight per administration, from about 690 μg/kg to about 710 μg/kg of body weight per administration, from about 710 μg/kg to about 730 μg/kg of body weight per administration, from about 730 μg/kg to about 750 μg/kg of body weight per administration, from about 750 μg/kg to about 770 μg/kg of body weight per administration, from about 770 μg/kg to about 790 μg/kg of body weight per administration, from about 790 μg/kg to about 810 μg/kg of body weight per administration, from about 810 μg/kg to about 830 μg/kg of body weight per administration, from about 830 μg/kg to about 850 μg/kg of body weight per administration, from about 850 μg/kg to about 870 μg/kg of body weight per administration, from about 870 μg/kg to about 890 μg/kg of body weight per administration, from about 890 μg/kg to about 910 μg/kg of body weight per administration, from about 910 μg/kg to about 930 μg/kg of body weight per administration, from about 930 μg/kg to about 950 μg/kg of body weight per administration, from about 950 μg/kg to about 970 μg/kg of body weight per administration, from about 970 μg/kg to about 990 μg/kg of body weight per administration, from about 990 μg/kg to about 1010 μg/kg of body weight per administration, from about 1010 μg/kg to about 1030 μg/kg of body weight per administration, from about 1030 μg/kg to about 1050 μg/kg of body weight per administration, from about 1050 μg/kg to about 1070 μg/kg of body weight per administration, from about 1070 μg/kg to about 1090 μg/kg of body weight per administration, from about 1090 μg/kg to about 1110 μg/kg of body weight per administration, from about 1110 μg/kg to about 1130 μg/kg of body weight per administration, from about 1130 μg/kg to about 1150 μg/kg of body weight per administration, from about 1150 μg/kg to about 1170 μg/kg of body weight per administration, from about 1170 μg/kg to about 1190 μg/kg of body weight per administration, from about 1190 μg/kg to about 1210 μg/kg of body weight per administration, from about 1210 μg/kg to about 1230 μg/kg of body weight per administration, from about 1230 μg/kg to about 1250 μg/kg of body weight per administration, from about 1250 μg/kg to about 1270 μg/kg of body weight per administration, from about 1270 μg/kg to about 1290 μg/kg of body weight per administration, from about 1290 μg/kg to about 1310 μg/kg of body weight per administration, from about 1310 μg/kg to about 1330 μg/kg of body weight per administration, from about 1330 μg/kg to about 1350 μg/kg of body weight per administration, from about 1350 μg/kg to about 1370 μg/kg of body weight per administration, from about 1370 μg/kg to about 1390 μg/kg of body weight per administration, from about 1390 μg/kg to about 1410 μg/kg of body weight per administration, from about 1410 μg/kg to about 1430 μg/kg of body weight per administration, from about 1430 μg/kg to about 1450 μg/kg of body weight per administration, from about 1450 μg/kg to about 1470 μg/kg of body weight per administration, from about 1470 μg/kg to about 1490 μg/kg of body weight per administration, from about 1490 μg/kg to about 1500 μg/kg of body weight per administration, or any combination thereof.

1303. The method for vaccination according to any of claims 1293-1302, wherein the individual in need thereof is a mammal.

1304. The method for vaccination according to any of claims 1293-1303, wherein the individual in need thereof is a human being.

1305. The method for vaccination according to any of claims 1293-1304, wherein the individual in need thereof is a newborn.

1306. The method for vaccination according to any of claims 1293-1304, wherein the individual in need thereof is a child.

1307. The method for vaccination according to any of claims 1293-1304, wherein the individual in need thereof is an adult.

1308. The method for vaccination according to any of claims 1293-1307, wherein the individual in need thereof is a woman/female.

1309. The method for vaccination according to any of claims 1293-1307, wherein the individual in need thereof is a man/male.

1310. The method for vaccination according to any of claims 1293-1309, wherein the individual in need thereof is of any age such as from newborn to 120 years old, for example from 0 to 6 months, such as from 6 to 12 months, for example from 1 to 5 years, such as from 5 to 10 years, for example from 10 to 15 years, such as from 15 to 20 years, for example from 20 to 25 years, such as from 25 to 30 years, for example from 30 to 35 years, such as from 35 to 40 years, for example from 40 to 45 years, such as from 45 to 50 years, for example from 50 to 60 years, such as from 60 to 70 years, for example from 70 to 80 years, such as from 80 to 90 years, for example from 90 to 100 years, such as from 100 to 110 years, for example from 110 to 120 years.

1311. The method for vaccination according to any of claims 1293-1310, wherein the individual in need thereof is of any race such as a Caucasian, a black person, an East Asian person, a person of Mongoloid race, a person of Ethiopian race, a person of Negroid race, a person of American Indian race, or a person of Malayan race.

1312. The method for vaccination according to any of claims 1293-1311, wherein the individual in need thereof is healthy.

1313. The method for vaccination according to any of claims 1293-1311, wherein the individual in need thereof is ill.

1314. The method for vaccination according to any of claims 1293-1313, wherein the individual in need thereof is diagnosed with one or more diseases.

1315. The method for vaccination according to any of claims 1293-1314, wherein the individual in need thereof has one or more symptoms of one or more diseases.

1316. The method for vaccination according to any of claims 1293-1315, wherein the individual in need thereof is asymptomatic.

1317. The method for vaccination according to any of claims 1293-1316, wherein the individual in need thereof is genetically disposed for one or more diseases.

1318. The method for vaccination according to any of claims 1293-1317, wherein the individual in need thereof is an animal.

1319. The method for vaccination according to any of claims 1293-1318, wherein the individual in need thereof is a bird.

1320. The method for vaccination according to any of claims 1293-1318, wherein the individual in need thereof is an insect.

1321. The method for vaccination according to any of claims 1293-1317, wherein the individual in need thereof is a plant.

1322. The method for vaccination according to any of claims 1293-1321, wherein the method comprises administration of said composition by oral administration.

1323. The method for vaccination according to any of claims 1293-1322, wherein the method comprises administration of said composition by sublingual administration.

1324. The method for vaccination according to any of claims 1293-1323, wherein the method comprises administration of said composition by nasal administration.

1325. The method for vaccination according to any of claims 1293-1324, wherein the method comprises administration of said composition by inhalation.

1326. The method for vaccination according to any of claims 1293-1325, wherein the method comprises administration of said composition by injection.

1327. The method for vaccination according to any of claims 1293-1326, wherein the method comprises administration of said composition by intravenous administration.

1328. The method for vaccination according to any of claims 1293-1327, wherein the method comprises administration of said composition by intramuscular administration.

1329. The method for vaccination according to any of claims 1293-1328, wherein the method comprises administration of said composition by intrathecal administration.

1330. The method for vaccination according to any of claims 1293-1329, wherein the method comprises administration of said composition by subcutan administration.

1331. The method for vaccination according to any of claims 1293-1330, wherein the method comprises administration of said composition by implantation.

1332. The method for vaccination according to any of claims 1293-1331, wherein the method comprises administration of said composition by rectal administration.

1333. The method for vaccination according to any of claims 1293-1332, wherein the method does not comprise administration of said composition by rectal administration.

1334. The method for vaccination according to any of claims 1293-1333, wherein the method comprises administration of said composition by vaginal administration.

1335. The method for vaccination according to any of claims 1293-1334, wherein the method does not comprise administration of said composition by vaginal administration.

1336. The method for vaccination according to any of claims 1293-1335, wherein the method comprises administration of said composition by the ocular route.

1337. The method for vaccination according to any of claims 1293-1336, wherein the method comprises administration of said composition by applying it to the skin (cutaneously) for a local (topical) effect.

1338. The method for vaccination according to any of claims 1293-1337, wherein the method comprises administration of said composition by applying it to the skin (cutaneously) for bodywide (systemic) effect.

1339. The method for vaccination according to any of claims 1293-1338, wherein the method comprises administration of said composition by delivering it through the skin (transdermally) for a systemic effect.

1340. The method for vaccination according to any of claims 1293-1339, wherein the method comprises administration of said composition by inter peritoneal injection.

1341. The method for vaccination according to any of claims 1293-1340, wherein the method comprises administration of said composition by transmucosal administration.

1342. The method for vaccination according to any of claims 1293-1341, wherein the method comprises administration of said composition by inoculation.

1343. The method for vaccination according to any of claims 1293-1342, wherein the method comprises administration of said composition by intravenous injection.

1344. The method for vaccination according to any of claims 1293-1343, wherein the method does not comprise administration of said composition by intravenous injection.

1345. The method for vaccination according to any of claims 1293-1344, wherein the method comprises administration of said composition by subcutaneous injection.

1346. The method for vaccination according to any of claims 1293-1345, wherein the method does not comprise administration of said composition by subcutaneous injection.

1347. The method for vaccination according to any of claims 1293-1346, wherein the method comprises administration of said composition by intradermal injection.

1348. The method for vaccination according to any of claims 1293-1347, wherein the method does not comprise administration of said composition by intradermal injection.

1349. The method for vaccination according to any of claims 1293-1348, wherein the composition is administered as intramuscular injections at time points 0, 4, 8, and 16 weeks such that a full dose is given at 0 weeks and half-full dose at 4, 8, and 16 weeks.

1350. The method for vaccination according to any of claims 1293-1349, wherein the composition is not administered as intramuscular injections at time points 0, 4, 8, and 16 weeks such that a full dose is given at 0 weeks and half-full dose at 4, 8, and 16 weeks.

1351. The method for vaccination according to any of claims 1293-1350, wherein the composition is administered as intramuscular injections at time points 0, 2, 4, 6, 8, 10, 12 and 14 weeks such that a full dose is given at each time point.

1352. The method for vaccination according to any of claims 1293-1351, wherein the composition is not administered as intramuscular injections at time points 0, 2, 4, 6, 8, 10, 12 and 14 weeks such that a full dose is given at each time point.

1353. The method for vaccination according to any of claims 1293-1352, wherein the method comprises administration of a single dose of said composition.

1354. The method for vaccination according to any of claims 1293-1353, wherein the method comprises administration of several doses of said composition such as 2, 3, 4, 5, 6, 7, 8, 9, or 10 doses.

1355. The method for vaccination according to any of claims 1293-1354, wherein the method comprises administration of said composition only once.

1356. The method for vaccination according to any of claims 1293-1355, wherein the method comprises administration of said composition more than once such as 2, 3, 4, 5, 6, 7, 8, 9 or 10 times.

1357. The method for vaccination according to any of claims 1293-1356, wherein the method comprises administration of said composition more than once with administration with intervals of a day.

1358. The method for vaccination according to any of claims 1293-1357, wherein the method comprises administration of said composition more than once with administration with intervals of a days, such as 2, 3, 4, 5, 6, 7, 8, 9, 10, 11, 12, 13, or 14 days.

1359. The method for vaccination according to any of claims 1293-1358, wherein the method comprises administration of said composition more than once with administration with intervals of about a week.

1360. The method for vaccination according to any of claims 1293-1359, wherein the method comprises administration of said composition more than once with administration with intervals of about two weeks.

1361. The method for vaccination according to any of claims 1293-1360, wherein the method comprises administration of said composition more than once with administration with intervals of about three weeks.

1362. The method for vaccination according to any of claims 1293-1361, wherein the method comprises administration of said composition more than once with administration with intervals of about a month.

1363. The method for vaccination according to any of claims 1293-1362, wherein the method comprises administration of said composition more than once with administration with intervals of several months, such as 2, 3, 4, 5, 6, 7, 8, 9, 10, 11 or 12 months.

1364. The method for vaccination according to any of claims 1293-1363, wherein the method comprises administration of said composition more than once with administration with intervals of years, such as 2, 3, 4, 5, 6, 7, 8, 9, 10, 12, 14, 16, 18, 20, 25, 30, 40, 50, 60, 70, 80, 90, 100 or 110 years.

1365. The method for vaccination according to any of claims 1293-1364, wherein the method comprises a continuous administration regime of said composition e.g. like up to four doses per week, followed by one month without administrations, followed by up to four doses per week.

1366. The method for vaccination according to any of claims 1293-1365, wherein the method comprises a vaccination protocol where administration is performed e.g. on week 0, 4, 8, and 16; or on week 0, 2, 4, 6, 8, 10, 12, and 14; or on week 0, 5, 11, 17; or on month 0, 1, and 2; or on day 0, 7, and 30; or every year.

1367. The method for vaccination according to any of claims 1293-1366, wherein the method comprises administration of said composition more than once and wherein the amount of pharmamer and/or peptide is increased from the first administration to one or more of the subsequent administrations.

1368. The method for vaccination according to any of claims 1293-1367, wherein the method comprises administration of said composition more than once and wherein the amount of pharmamer and/or peptide is decreased from the first administration to one or more of the subsequent administrations.

1369. The method for vaccination according to any of claims 1293-1368, wherein the method comprises administration of said composition more than once and wherein the ratio of biologically active molecules in said composition is modified from the first administration to one or more of the subsequent administrations.

1370. The method for vaccination according to any of claims 1293-1369, wherein the method comprises administration of said composition more than once and wherein the type of adjuvant(s) in said composition is modified from the first administration to one or more of the subsequent administrations.

1371. The method for vaccination according to any of claims 1293-1370, wherein the method comprises administration of said composition more than once and wherein the amount of one or more adjuvant(s) in said composition is modified from the first administration to one or more of the subsequent administrations.

1372. The method for vaccination according to any of claims 1293-1371, wherein the method comprises administration of said composition more than once and wherein the combination of adjuvants in said composition is modified from the first administration to one or more of the subsequent administrations.

1373. The method for vaccination according to any of claims 1293-1372, wherein the method comprises use of an administration protocol linked to age of the individual in need of said vaccine.

1374. The method for vaccination according to any of claims 1293-1373, wherein the method comprises use of an administration protocol for childhood vaccines e.g. wherein the vaccine is administered at the age of 3 month, 5, month, and 12 month; or 3 month, 5, month, 12 month, and 5 years; or 15 month, and 4 years.

1375. The method for vaccination according to any of claims 1293-1374, wherein the method comprises administration of said composition more than once such as 2, 3, 4, 5, 6, 7 or 8 times with 1 to 2 weeks interval.

1376. The method for vaccination according to any of claims 1293-1375, wherein the method does not comprise administration of said composition more than once such as 2, 3, 4, 5, 6, 7 or 8 times with 1 to 2 weeks interval.

1377. The method for vaccination according to any of claims 1293-1376, wherein the method comprises administration of said composition together with administration of one or more medicament, wherein the administration can be simultaneously or sequentially in any order.

1378. The method for vaccination according to any of claims 1293-1377, wherein the composition is administered together with one or more adjuvants.

1379. The method for vaccination according to any of claims 1293-1378, wherein the composition is administered simulataneously with one or more adjuvants.

1380. The method for vaccination according to any of claims 1293-1379, wherein the composition is administered together with one or more adjuvants sequentially in any order.

1381. The method for vaccination according to any of claims 1293-1380, wherein the composition is administered more than once and wherein each administration comprises the same amount of the composition.

1382. The method for vaccination according to any of claims 1293-1381, wherein the composition is administered more than once and wherein each administration comprises different amounts of the composition.

1383. The method for vaccination according to any of claims 1293-1382, wherein the composition is administered more than once and wherein each administration comprises increasing amounts of the composition.

1384. The method for vaccination according to any of claims 1293-1383, wherein the composition is administered more than once and wherein each administration comprises decreasing amounts of the composition.

1385. The method for vaccination according to any of claims 1293-1384, wherein the composition is administered more than once and wherein each administration does not comprise the same amount of the composition.

1386. The method for vaccination according to any of claims 1293-1385, wherein the composition is administered more than once and wherein each administration does not comprise different amounts of the composition.

1387. The method for vaccination according to any of claims 1293-1386, wherein the composition is administered more than once and wherein each administration does not comprise increasing amounts of the composition.

1388. The method for vaccination according to any of claims 1293-1387, wherein the composition is administered more than once and wherein each administration does not comprise decreasing amounts of the composition.

1389. The method for vaccination according to any of claims 1293-1388, wherein the vaccination is prophylactic.

1390. The method for vaccination according to any of claims 1293-1389, wherein the vaccination is ameliorating.

1391. The method for vaccination according to any of claims 1293-1390, wherein the vaccination is curative.

1392. The method for vaccination according to any of claims 1293-1391, wherein the vaccination is life prolonging.

1393. The method for vaccination according to any of claims 1293-1392, wherein the composition is administered at the cervico-vaginal mucosa i.e. vaginally or IM i.e. intra-muscular.

1394. The method for vaccination according to any of claims 1293-1393, wherein the composition is administered alone or together with additional adjuvant(s) such as but not limited to Titermax Gold, Alhydrogel (Aluminium-hydroxide), MF59 and/or the proprietary Montanide ISA720.

1395. The method for vaccination according to any of claims 1293-1394, wherein the vaccination is for treatment of one or more diseases caused by one or more viral infection(s).

1396. The method for vaccination according to claim 1395, wherein viral infection is caused by dsDNA vira such as Adenoviruses, Herpesviruses, Poxviruses.

1397. The method for vaccination according to any of claims 1395-1396, wherein viral infection is caused by ssDNA vira (+)sense DNA such as Parvoviruses.

1398. The method for vaccination according to any of claims 1395-1397, wherein viral infection is caused by dsRNA vira such as Reoviruses.

1399. The method for vaccination according to any of claims 1395-1398, wherein viral infection is caused by (+)ssRNA vira (+)sense RNA such as Picornaviruses and Togaviruses.

1400. The method for vaccination according to any of claims 1395-1399, wherein viral infection is caused by (−)ssRNA vira (−)sense RNA such as Orthomyxoviruses and Rhabdoviruses.

1401. The method for vaccination according to any of claims 1395-1400, wherein viral infection is caused by ssRNA-RT vira (+)sense RNA with DNA intermediate in life-cycle such as Retroviruses.

1402. The method for vaccination according to any of claims 1395-1401, wherein viral infection is caused by dsDNA-RT vira such as Hepadnaviruses.

1403. The method for vaccination according to any of claims 1395-1402, wherein viral infection is caused by one or more vira selected from the group consisting of Abelson murine leukemia virus (Ab-MLV, A-MuLV), acute laryngotracheobronchitis virus (or HPIV), Adelaide River virus, Adeno-associated virus group (Dependevirus), Adenovirus, African horse sickness virus, African swine fever virus, AIDS virus, Aleutian mink disease, parvovirus, alfalfa mosaic virus, Alphaherpesvirinae (including HSV 1 and 2 and varicella), Alpharetrovirus (Avian leukosis virus, Rous sarcoma virus), Alphavirus, alkhurma virus, ALV related virus, Amapari virus, Andean potato mottle virus, Aphthovirus, Aquareovirus, arbovirus, arbovirus C, arbovirus group A, arbovirus group B, Arenavirus group, Argentine hemorrhagic fever virus, Argentinian hemorrhagic fever virus, Arterivirus, Astrovirus, Ateline herpesvirus group, Aujezky's disease virus, Aura virus, Ausduk disease virus, Australian bat lyssavirus, Aviadenovirus, avian erythroblastosis virus, avian infectious bronchitis virus, avian leukemia virus, Avian leukosis virus (ALV), avian lymphomatosis virus, avian myeloblastosis virus, avian paramyxovirus, avian pneumoencephalitis virus, avian reticuloendotheliosis virus, avian sarcoma virus, avian type C retrovirus group, Avihepadnavirus, Avipoxvirus, B virus (Cercopithecine herpesvirus 1), B19 virus (Parvovirus B19), Babanki virus, baboon herpesvirus, bacterial virus, baculovirus, barley yellow dwarf virus, Barmah Forest virus, bean pod mottle virus, bean rugose mosaic virus, Bebaru virus, Berrimah virus, Betaherpesvirinae, betaretrovirus, Bird flu, Birnavirus, Bittner virus, BK virus, Black Creek Canal virus, bluetongue virus, Bolivian hemorrhagic fever virus, Boma disease virus, border disease of sheep virus, borna virus, bovine alphaherpesvirus 1, bovine alphaherpesvirus 2, bovine coronavirus, bovine ephemeral fever virus, bovine immunodeficiency virus, bovine leukemia virus, bovine leukosis virus, bovine mammillitis virus, bovine papillomavirus, bovine papular stomatitis virus, bovine parvovirus, bovine syncytial virus, bovine type C oncovirus, bovine viral diarrhea virus, bracovirus, broad bean mottle virus, broad bean stain virus, brome mosaic virus, Bromovirus, Buggy Creek virus, bullet shaped virus group, Bunyamwera virus, Bunyavirus, Burkitt's lymphoma virus, Bwamba Fever, Bwattany hetero virus, CA virus (Croup-associated virus/parainfluenza virus type 2), Calicivirus, California encephalitis virus, camelpox virus, canarypox virus, canid herpesvirus, canine coronavirus, canine distemper virus, canine herpesvirus, canine minute virus, canine parvovirus, Cano Delgadito virus, Capillovirus, caprine arthritis virus, caprine encephalitis virus, Caprine Herpes Virus, Capripox virus, Cardiovirus, Carlavirus, Carmovirus, carrot mottle virus, Cassia yellow blotch virus, Caulimovirus, Cauliflower mosaic virus, caviid herpesvirus 1, Cercopithecine herpesvirus 1, Cercopithecine herpesvirus 2, cereal yellow dwarf virus, Chandipura virus, Changuinola virus, channel catfish virus, Charleville virus, chickenpox virus, Chikungunya virus, chimpanzee herpesvirus, Chordopoxyirinae, chub reovirus, chum salmon virus, Closterovirus, Cocal virus, Coho salmon reovirus, coital exanthema virus, Colorado tick fever virus, Coltivirus Columbia SK virus, Commelina yellow mottle virus, Common cold virus, Comovirus, Condylomata accuminata, congenital cytomegalovirus, contagious eethyma virus, contagious pustular dermatitis virus, Coronavirus, Corriparta virus, coryza virus, cowpea chlorotic mottle virus, cowpea mosaic virus, cowpea virus, cowpox virus, coxsackie virus, CPV (cytoplasmic polyhedrosis virus), cricket paralysis virus, Crimean-Congo hemorrhagic fever virus, croup associated virus, Crypotovirus, Cucumovirus, Cypovirus, Cytomegalovirus (HCMV or Human Herpesvirus 5 HHV-5), cytoplasmic polyhedrosis virus, Cytorhabdovirus, deer papillomavirus, Deltaretrovirus (Human T-lymphotrophic virus), Deformed wing virus DWV, Dengue, Densovirus, Dependovirus, Dhori virus, Dianthovirus, diplorna virus, DNA virus, Dobrava-Belgrade Virus, Dog Flu, Drosophila C virus, duck hepatitis B virus, duck hepatitis virus 1, duck hepatitis virus 2, duovirus, Duvenhage virus, eastern equine encephalitis virus, eastern equine encephalomyelitis virus, Ebola virus, Ebola-like virus, Echovirus, echovirus 10, echovirus 28, echovirus 9, ectromelia virus, EEE virus (Eastern equine encephalitis virus), EIA virus (equine infectious anemia), EMC virus (Encephalomyocarditis), Emiliania huxleyi virus 86, encephalitis virus, encephalomyocarditis virus, Endogenous retrovirus, Enterovirus, Entomopoxyirinae, Entomopoxvirus A, Entomopoxvirus B, Entomopoxvirus C, enzyme elevating virus, epidemic hemorrhagic fever virus, epizootic hemorrhagic disease virus, Epsilonretrovirus, Epstein-Barr virus (EBV; Human herpesvirus 4 HHV-4), equid alphaherpesvirus 1, equid alphaherpesvirus 4, equid herpesvirus 2, equine abortion virus, equine arteritis virus, equine encephalosis virus, equine infectious anemia virus, equine morbillivirus, equine rhinopneumonitis virus, equine rhinovirus, Eubenangu virus, European elk papillomavirus, European swine fever virus, Everglades virus, Eyach virus, Fabavirus, felid herpesvirus 1, feline calicivirus, feline fibrosarcoma virus, feline herpesvirus, feline immunodeficiency virus, feline infectious peritonitis virus, feline leukemia/sarcoma virus, feline leukemia virus, feline panleukopenia virus, feline parvovirus, feline sarcoma virus, feline syncytial virus, Fijivirus, Filovirus, Flanders virus, Flavivirus, foot and mouth disease virus, Fort Morgan virus, Four Corners hantavirus, fowl adenovirus 1, Fowlpox virus, Friend virus, Furovirus, Gammaherpesvirinae, gammaretrovirus, GB virus C (GBV-C; formerly Hepatitis G virus), Geminivirus, German measles virus, Getah virus, gibbon ape leukemia virus, green monkey virus (mullburg), glandular fever virus, goatpox virus, golden shinner virus, Gonometa virus, goose parvovirus, granulosis virus, Gross' virus, ground squirrel hepatitis B virus, group A arbovirus, Guanarito virus, guinea pig cytomegalovirus, guinea pig type C virus, Hantavirus, hard clam reovirus, hare fibroma virus, HCMV (human cytomegalovirus), helper virus, hemadsorption virus 2, hemagglutinating virus of Japan, hemorrhagic fever virus, Hendra virus, Henipaviruses, Hepadnavirus, hepatitis A virus, hepatitis B virus, hepatitis C virus, hepatitis D (delta) virus, hepatitis E virus, hepatitis F virus, hepatitis G virus, hepatitis nonA nonB virus, hepatoencephalomyelitis reovirus 3, Hepatovirus, heron hepatitis B virus, herpes B virus, Herpes simplex virus, herpes simplex virus 1, herpes simplex virus 2, Herpesvirus, Herpes zoster, Herpes virus 6, Herpes virus 7, Herpes virus 8, Herpesvirus ateles, Herpesvirus hominis, Herpesvirus saimiri, Herpesvirus suis, Herpesvirus varicellae, Highlands J virus, Hirame rhabdovirus, HIV-1, hog cholera virus, Hordeivirus, Horse Flu, HTLV-1, HTLV-2, human adenovirus 2, human alphaherpesvirus 1, human alphaherpesvirus 2, human alphaherpesvirus 3, human B lymphotrophic virus, human betaherpesvirus 5, human coronavirus, Human enterovirus A, Human enterovirus B, Human Flu, human foamy virus, human gammaherpesvirus 4, human gammaherpesvirus 6, human hepatitis A virus, human herpesvirus 1 group, human herpesvirus 2 group, human herpesvirus 3 group, human herpesvirus 4 group, human herpesvirus 6, human herpesvirus 8, human immunodeficiency virus (HIV), human immunodeficiency virus 1, human immunodeficiency virus 2, Human metapneumovirus, human papillomavirus, human T cell leukemia virus, human T cell leukemia virus I, human T cell leukemia virus II, human T cell leukemia virus III, human T cell lymphoma virus I, human T cell lymphoma virus II, human T cell lymphotrophic virus type 1, human T cell lymphotrophic virus type 2, human T lymphotrophic virus I, human T lymphotrophic virus II, human T lymphotrophic virus III, ichnovirus, Ilarvirus, infantile gastroenteritis virus, infectious bovine rhinotracheitis virus, infectious haematopoietic necrosis virus, infectious pancreatic necrosis virus, influenza virus, influenzavirus A, influenzavirus B, influenzavirus C, influenzavirus D, influenzavirus pr8, insect iridescent virus, insect virus, interfering virus, iridovirus, Isavirus, Japanese B virus, Japanese encephalitis virus, JC virus, Junin virus, Johnson grass mosaic virus, Kaposi's sarcoma-associated herpesvirus, Kemerovo virus, Kilham's rat virus, Klamath virus, Kolongo virus, Korean hemorrhagic fever virus, kumba virus, Kumlinge virus, Kunjin virus, Kyasanur forest disease, Kyzylagach virus, La Crosse virus, lactic dehydrogenase elevating virus, Lagos bat virus, Lambda phage, langat virus, Langur virus, lapine parvovirus, Lassa fever virus, Lassa virus, latent rat virus, LCM virus, Leaky virus, Lentivirus, Leporipoxvirus, leukemia virus, leukovirus, louping ill virus, lumpy skin disease virus, Luteovirus, lymphadenopathy associated virus, Lymphocytic choriomeningitis virus (LCMV), Lymphocryptovirus, lymphocytic choriomeningitis virus, lymphoproliferative virus group, Lyssavirus, Machupo virus, mad itch virus, maize chlorotic dwarf virus, maize rough dwarf virus, mammalian type B oncovirus group, mammalian type B retroviruses, mammalian type C retrovirus group, mammalian type D retroviruses, mammary tumor virus, Mapuera virus, Marafivirus, Marburg virus, Marburg-like virus, Mason Pfizer monkey virus, Mastadenovirus, Mayaro virus, ME virus, Measles virus, Melandrium yellow fleck virus, Menangle virus, Mengo virus, Mengovirus, Merkel cell polyomavirus, Middelburg virus, milkers nodule virus, mink enteritis virus, minute virus of mice, MLV related virus, MM virus, Mokola virus, Molluscipoxvirus, Molluscum contagiosum virus, Moloney murine leukemia virus (M-MuLV), monkey B virus, Monkeypox virus, Mononegavirales, Morbillivirus, Mount Elgon bat virus, mouse cytomegalovirus, mouse encephalomyelitis virus, mouse hepatitis virus, mouse K virus, mouse leukemia virus, mouse mammary tumor virus, mouse minute virus, mouse pneumonia virus, mouse poliomyelitis virus, mouse polyomavirus, mouse sarcoma virus, mousepox virus, Mozambique virus, Mucambo virus, mucosal disease virus, Mumps virus, murid betaherpesvirus 1, murid cytomegalovirus 2, murine cytomegalovirus group, murine encephalomyelitis virus, murine hepatitis virus, murine leukemia virus, murine nodule inducing virus, murine polyomavirus, murine sarcoma virus, Muromegalovirus, Murray Valley encephalitis virus, myxoma virus, Myxovirus, Myxovirus multiforme, Myxovirus parotitidis, Nairobi sheep disease virus, Nairovirus, Nanirnavirus, Nariva virus, Ndumo virus, Necrovirus, Neethling virus, Nelson Bay virus, Nemtick Virus, Nepovirus, neurotropic virus, New World Arenavirus, newborn pneumonitis virus, Newcastle disease virus, Nipah virus, noncytopathogenic virus, Norovirus, Norwalk virus, nuclear polyhedrosis virus (NPV), nipple neck virus, O'nyong'nyong virus, oat sterile dwarf virus, Ockelbo virus, Omsk hemorrhagic fever virus, oncogenic virus, oncogenic viruslike particle, oncornavirus, Orbivirus, Orf virus, Oropouche virus, Orthohepadnavirus, orthomyxovirus, Orthopoxvirus, Orthoreovirus, Orungo, ovine papillomavirus, ovine catarrhal fever virus, owl monkey herpesvirus, Palyam virus, Papillomavirus, Papillomavirus sylvilagi, Papovavirus, Parainfluenza virus human (HPIV), parainfluenza virus type 1 human (HPIV-1), parainfluenza virus type 2 human (HPIV-2), parainfluenza virus type 3 human (HPIV-3), parainfluenza virus type 4 human (HPIV-4), Paramyxovirus, Parapoxvirus, paravaccinia virus, parsnip yellow fleck virus, Parvovirus, Parvovirus B19, pea enation mosaic virus, Pestivirus, Phlebovirus, phocine distemper virus, Phytoreovirus, Picodnavirus, Picornavirus, pig cytomegalovirus, pigeonpox virus, Piry virus, Pixuna virus, plant rhabdovirus group, plant virus, pneumonia virus of mice, Pneumovirus, Poliomyelitis virus, Poliovirus, Polydnavirus, polyhedral virus, Polyoma virus, Polyomavirus, Polyomavirus bovis, Polyomavirus cercopitheci, Polyomavirus hominis 2, Polyomavirus maccacae 1, Polyomavirus muris 1, Polyomavirus muris 2, Polyomavirus papionis 1, Polyomavirus papionis 2, Polyomavirus sylvilagi, Pongine herpesvirus 1, porcine epidemic diarrhea virus, porcine hemagglutinating encephalomyelitis virus, porcine parvovirus, porcine transmissible gastroenteritis virus, porcine type C virus, Potato leaf roll virus, Potato mop top virus, Potato virus Y, Potexvirus, Potyvirus, Powassan encephalitis virus, Poxvirus, poxvirus variolae, Prospect Hill virus, provirus, pseudocowpox virus, pseudorabies virus, psittacinepox virus, Puumala virus, Qalyub virus, Quail pea mosaic virus, quailpox virus, Queensland fruitfly virus, Quokkapox virus, rabbit fibroma virus, rabbit kidney vaculolating virus, rabbit papillomavirus, Rabies virus, raccoon parvovirus, raccoonpox virus, radish mosaic virus, Ranikhet virus, rat cytomegalovirus, rat parvovirus, rat virus, Rauscher's virus, recombinant vaccinia virus, recombinant virus, Red Clover Necrotic Mosaic Virus, reovirus, reovirus 1, reovirus 2, reovirus 3, reptilian type C virus, Respiratory syncytial virus, respiratory virus, reticuloendotheliosis virus, Retrovirus, Rhabdovirus, Rhabdovirus carpia, Rhadinovirus, Rhinovirus, Rhizidiovirus, rice dwarf virus, rice gall dwarf virus, rice hoja blanca virus, rice ragged stunt virus, Rift Valley fever virus, Riley's virus, rinderpest virus, RNA tumor virus, RNA virus, Roseolovirus, Ross River virus, Rotavirus, rougeole virus, Rous sarcoma virus, Rubella virus, rubeola virus, Rubivirus, Russian autumn encephalitis virus, S6-14-03 virus, SA 11 simian virus, SA 15, SA2 virus, SA6 virus, SA8 virus, Sabia virus, Sabio virus, Sabo virus, Saboya virus, Sabulodes caberata GV, Sacbrood virus, Saccharomyces cerevisiae virus L-A, Saccharomyces cerevisiae virus La, Saccharomyces cerevisiae virus LBC, Sagiyama virus, Saguaro cactus virus, Saimiriine herpesvirus 1, Saimiriine herpesvirus 2, Sainpaulia leaf necrosis virus, SaintAbb's Head virus, Saint-Floris virus, Sakhalin virus, Sal Vieja virus, Salanga virus, Salangapox virus, Salehabad virus, salivary gland virus, Salmonid herpesvirus 1, Salmonid herpesvirus 2, Salmonis virus, Sambucus vein clearing virus, Samia cynthia NPV, Samia pryeri NPV, Samia ricini NPV, Sammons' Opuntia virus, SanAngelo virus, San Juan virus, San Miguel sealion virus, San Perlita virus, Sand rat nuclear inclusion agents, Sandfly fever Naples virus, Sandfly fever Sicilian virus, Sandjimba virus, Sango virus, Santa Rosa virus, Santarem virus, Santosai temperate virus, Sapphire II virus, Sapporo-like virus, Saraca virus, Sarracenia purpurea virus, SARS virus, satellite virus, Sathuperi virus, Satsuma dwarf virus, Saturnia pavonia virus, Saturnia pyri NPV, Saumarez Reef virus, Sawgrass virus, Sceliodes cordalis NPV, Schefflera ringspot virus, Sciaphila duplex GV, Scirpophaga incertulas NPV, Sciurid herpesvirus, Sciurid herpesvirus 2, Scoliopteryx libatFix NPV, Scopelodes contracta NPV, Scopelodes venosa NPV, Scopula subpunctaria NPV, Scotogramma trifolii GV, Scotogramma trifolu NPV, Scrophularia mottle virus, SDAV (sialodacryoadenitis virus), sealpox virus, Selenephera lunigera NPV, Selepa celtis GV, Seletar virus, Selidosema suavis NPV, Semidonta biloba NPV, Semiothisa sexmaculata GV, Semliki Forest Virus, Sena Madureira virus, Sendai virus, SENV-D, SENV-H, Seoul virus, Sepik virus, Serra do Navio virus, Serrano golden mosaic virus, Sesame yellow mosaic virus, Sesamia calamistis NPV, Sesamia cretica GV, Sesamia inferens NPV, Sesamia nonagrioides GV, Setora nitens virus, Shallot latent virus, Shamonda virus, Shark River virus, Sheep associated malignant catarrhal fever, Sheep papillomavirus, Sheep pulmonary adenomatosis associated herpesvirus, sheeppox virus, Shiant Islands virus, Shokwe virus, Shope fibroma virus, Shope papilloma virus, Shuni virus, Siamese cobra herpesvirus, Sibine fusca densovirus, Sida golden mosaic virus (SiGMV), Sida golden yellow vein virus (SiGYVV), Sigma virus, Sikte water-borne virus, Silverwater virus, Simbu virus, Simian adenoviruses 1 to 27, Simian agent virus 12, Simian enterovirus 1 to 18, simian foamy virus, Simian hemorrhagic fever virus, simian hepatitis A virus, simian human immunodeficiency virus, simian immunodeficiency virus, simian parainfluenza virus, Simian rotavirus SA11, Simian sarcoma virus, simian T cell lymphotrophic virus, Simian type D virus 1, Simian vancella herpesvirus, simian virus, simian virus 40, Simplexvirus, Simulium vittatum densovirus, Sin Nombre virus, Sindbis virus, Sint1 em's onion latent virus, Sixgun city virus, Skunkpox virus, Smallpox virus, Smelt reovirus, Smerinthus ocellata NPV, Smithiantha virus, Snakehead rhabdovirus, Snowshoe hare virus, Snyder-Theilen feline sarcoma virus, Sobemovirus, Sofyn virus, Soil-borne wheat mosaic virus, Sokoluk virus, Solanum apical leaf curl virus, Solanum nodiflorum mottle virus, Solanurn yellows virus, Soldado virus, Somerville virus 4, Sonchus mottle virus, Sonchus virus, Sonchus yellow net virus, Sorghum chlorotic spot virus, Sorghum mosaic virus, Sorghum virus, Sororoca virus, Soursop yellow blotch virus, SouthAfrican passiflora virus, South American hemorrhagic fever viruses, SouthAfrican passiflora virus, South River virus, Southern bean mosaic virus, Southern potato latent virus, Sowbane mosaic virus, Sowthistle yellow vein virus, Soybean chlorotic mottle virus, Soybean crinkle leaf virus, Soybean dwarf virus, Soybean mosaic virus, SPAr-2317 virus, Sparganothis pettitana NPV, sparrowpox virus, Spartina mottle virus, Spectacled caimanpox virus, SPH 114202 virus, Sphenicid herpesvirus 1, Sphinx ligustri NPV, Spider monkey herpesvirus, Spilarctia subcarnea NPV, Spilonota ocellana NPV, Spilosoma lubricipeda NPV, Spinach latent virus, Spinach temperate virus, Spiroplasma phage 1, Spiroplasma phage 4, Spiroplasma phage aa, Spiroplasma phage C1/T52, Spodoptera exempta cypovirus, Spodoptera exigua virus, Spodoptera frugiperda virus, Spodoptera latifascia virus, Spodoptera littoralis, Spodoptera mauritia virus, Spodoptera ornithogalli virus, Spondweni virus, spring beauty latent virus, Spring viremia of carp virus, Spumavirus (SFV, HFV), Squash leaf curl virus, squash mosaic virus, squirrel fibroma virus, Squirrel monkey herpesvirus, squirrel monkey retrovirus, SR-11 virus, Sri Lankan passionfruit mottle virus, Sripur virus, SSV 1 virus group, StAbbs Head virus, St. Louis encephalitis virus, Staphylococcus phage 107, Staphylococcus phage 187, Staphylococcus phage 2848A, Staphylococcus phage 3A, Staphylococcus phage 44A HJD, Staphylococcus phage 77, Staphylococcus phage B11-M15, Staphylococcus phage Twort, Starlingpox virus, Statice virus Y, P, STLV (simian T lymphotrophic virus) type I, STLV (simian T lymphotrophic virus) type II, STLV (simian T lymphotrophic virus) type III, stomatitis papulosa virus, Stratford virus, Strawberry crinkle virus, Strawberry latent ringspot virus, Strawberry mild yellow edge virus, Strawberry vein banding virus, Streptococcus phage 182, Streptococcus phage 2BV, Streptococcus phage A25, Streptococcus phage 24, Streptococcus phage PE1, Streptococcus phage VD13, Streptococcus phage fD8, Streptococcus phage CP-1, Streptococcus phage Cvir, Streptococcus phage H39, Strigid herpesvirus 1, Striped bass reovirus, Striped Jack nervous, necrosis virus, Stump-tailed macaque virus, submaxillary virus, Subterranean clover mottle virus, Subterranean clover mottle virus satellite, Subterranean clover red leaf virus, Subterranean clover stunt virus, Sugarcane bacilliform virus, Sugarcane mild mosaic virus, Sugarcane mosaic virus, Sugarcane streak virus, suid alphaherpesvirus 1, suid herpesvirus 2, Suipoxvirus, Sulfolobus virus 1, Sunday Canyon virus, Sunflower crinkle virus, Sunflower mosaic virus, Sunflower rugose mosaic virus, Sunflower yellow blotch virus, Sunflower yellow ringspot virus, Sun-hemp mosaic virus, swamp fever virus, Sweet clover necrotic mosaic virus, Sweet potato A virus, Sweet potato chlorotic leafspot virus, Sweet potato feathery mottle virus, Sweet potato internal cork virus, Sweet potato latent virus, Sweet potato mild mottle virus, Sweet potato russet crack virus, Sweet potato vein mosaic virus, Sweet potato yellow dwarf virus, Sweetwater Branch virus, Swine cytomegalovirus, Swine Flu, Swine infertility and respiratory syndrome virus, swinepox virus, Swiss mouse leukemia virus, Sword bean distortion mosaic virus, Synaxis jubararia NPV, Synaxis pallulata NPV, Synetaeris tenuifemur virus, Syngrapha selecta NPV, T4 phage, T7 phage, TAC virus, Tacaiuma virus, Tacaribe complex virus, Tacaribe virus, Tadpole edema virus LT 1-4, Taggert virus, Tahyna virus, Tai virus, Taiassui virus, Tamana bat virus, Tamarillo mosaic virus, Tamdy virus, Tamiami virus, Tanapox virus, Tanga virus, Tanjong Rabok virus, Taro bacilliform virus, Badnavirus Tataguine virus, Taterapox virus, Taterapox virus, Teasel mosaic virus, Tehran virus, Telfairia mosaic virus, Telok Forest virus, Tembe virus, Tembusu virus, Tench reovirus, Tensaw virus, Tenvivirus, Tephrosia symptomless virus, Termeil virus, Tete virus, Tetralopha scortealis NPV, Tetropium cinnamoptemm NPV, Texas pepper virus, Thailand virus, Thaumetopoea pityocampa virus, Theiler's encephalomyelitis virus, Theiler's virus, Theophila mandarina NPV, Theretra japonica NPV, Thermoproteus virus 1, Thermoproteus virus 2, Thermoproteus virus 3, Thermoproteus virus 4, Thiafora virus, Thimiri virus, Thistle mottle virus, Thogoto virus, Thormodseyjarklettur virus, Thosea asigna virus, Thosea baibarana NPV, Thosea sinensis GV, Thottapalayam virus, Thylidolpteryx ephemeraeformis NPV, Thymelicus lineola NPV, Tibrogargan virus, Ticera castanea NPV, Tick borne encephalitis virus (TBEV)—European and Far Eastern subtypes, Tillamook virus, Tilligerry virus, Timbo virus, Tilmboteua virus, Tilmaroo virus, Tindholmur virus, Tinea pellionella NPV, Tineola hisselliella NPV, Tinpula paludosa NPV, Tinracola plagiata NPV, Tioman virus, Tlacotalpan virus, Tobacco bushy top virus, Tobacco etch virus, Tobacco leaf curl virus, Tobacco mild green mosaic virus, tobacco mosaic virus, Tobacco mosaic virus satellite, Tobacco mottle virus, Tobacco necrosis virus, Tobacco necrosis virus satellite, Tobacco necrosis virus small satellite, Tobacco necrotic dwarf virus, tobacco rattle virus, Tobacco ringspot virus, Tobacco streak virus, Tobacco stunt virus, Tobacco vein banding mosaic virus, Tobacco vein distorting virus Tobacco vein mottling virus, Tobacco wilt virus, Tobacco yellow dwarf virus, Tobacco yellow net virus, Tobacco yellow vein virus, Tobamovirus Tobravirus, Togavirus, Tomato apical stunt viroid, Tomato aspermy virus, Tomato black ring virus, Tomato black ring virus satellite, Tomato bunchy top viroid, tomato bushy stunt virus, Tomato bushy stunt virus satellite, Tomato golden mosaic virus, Tomato leaf crumple virus, Tomato leaf curl virus, Tomato leafroll virus, Tomato mosaic virus, Tomato mottle virus, Tomato pale chlorosis virus, Tomato planta macho viroid, Tomato pseudo-curly top virus, Tomato ringspot virus, Tomato spotted wilt virus, Tomato top necrosis virus, Tomato vein yellowing virus, Tomato yellow dwarf virus, Tomato yellow leaf curl virus, Tomato yellow mosaic virus, Tomato yellow top virus, Tombusvirus, Tongan vanilla virus, Torovirus, Torque teno virus, Tortrix loeflingiana NPV, Tortrix viridana NPV, Toscana virus, Tospovirus, Toxorhynchites brevipalpis NPV, Trabala vishnou NPV, Tradescantia/Zebrina virus, Trager duck spleen necrosis virus, Tranosema sp. Virus, transforming virus, Tree shrew adenovirus 1, Tree shrew herpesvims, Triatoma virus, Tribec virus, Trichiocampus irregularis NPV, Trichiocampus viminalis NPV, Trichomonas vaginalis virus, Trichoplusia ni cypovirus 5, Trichoplusia ni granulovirus, Trichoplusia ni MNPV, Trichoplusia ni Single SNPV, Trichoplusia ni virus, Trichosanthes mottle virus, Triticum aestivum chlorotic spot virus, Trivittatus virus, Trombetas virus, Tropaeolum virus 1, Tropaeolum virus 2, Trubanarnan virus, Tsuruse virus, Tucunduba virus, Tulare apple mosaic virus, Tulip band breaking virus, Tulip breaking virus, Tulip chlorotic blotch virus, Tulip top breaking virus, Tulip virus X, tumor virus, Tupaia virus, Tupaiid herpesvirus 1, Turbot herpesvirus, Turbot reovirus, Turkey adenoviruses 1 to 3, Turkey coronavirus, Turkey herpesvirus 1, turkey rhinotracheitis virus, turkeypox virus, Turlock virus, Turnip crinkle virus, Turnip crinkle virus satellite, Turnip mild yellows virus, Turnip mosaic virus, Turnip rosette virus, turnip yellow mosaic virus, Turuna virus, Tymovirus, Tyuleniy virus, type C retroviruses, type D oncovirus, type D retrovirus group, Uasin Gishu disease virus, Uganda S virus, Ugymyia sericariae NPV, ulcerative disease rhabdovirus, Ullucus mild mottle virus, Ullucus mosaic virus, Ullucus virus C, Umatilla virus, Umbre virus, Una virus, Upolu virus, UR2 sarcoma virus, Uranotaenia sapphirina NPV, Urbanus proteus NPV, Urucuri virus, Ustilago maydis virus 1, Ustilago maydis virus 4, Ustilago maydis virus 6, Usutu virus, Uting a virus, Utive virus, Uukuniemi virus group, Vaccinia virus, Vaeroy virus, Vallota mosaic virus, Vanessa atalanta NPV, Vanessa cardui NPV, Vanessa prorsa NPV, Vanilla mosaic virus, Vanilla necrosis virus, Varicella zoster virus, Varicellovirus, Varicola virus, variola major virus, variola virus, Vasin Gishu disease virus, Vellore virus, Velvet tobacco mottle virus, Velvet tobacco mottle virus satellite, Venezuelan equine encephalitis virus, Venezuelan equine encephalomyelitis virus, Venezuelan hemorrhagic fever virus, Vesicular stomatitis virus, Vesiculovirus, Vibrio phage 06N-22P, Vibrio phage 06N-58P, Vibrio phage 4996, Vibrio phage a3a, Vibrio phage I, Vibrio phage II, Vibrio phage m, Vibrio phage IV, Vibrio phage kappa, Vibrio phage nt-1, Vibrio phage OXN-52P, Vibrio phage OXN-IOOP, Vibrio phage v6, Vibrio phage VfI2, Vibrio phage Vf33, Vibrio phage VP1, Vibrio phage VP11, Vibrio phage VP3, Vibrio phage VP5, Vibrio phage X29, Vicia cryptic virus, Vigna sinensis mosaic virus, Vilyuisk virus, Vinces virus, Viola mottle virus, viper retrovirus, viral haemorrhagic septicemia virus, virus-like particle, Visna Maedi virus, Visna virus, Voandzeia mosaic virus, Voandzeia necrotic mosaic virus, volepox virus, Wad Medani virus, Wallal virus, Walleye epidermal hyperplasia, Walrus calicivirus, Wanowrie virus, Warrego virus, Watermelon chlorotic stunt virus, Watermelon curly mottle virus, Watermelon mosaic virus 1, Watermelon mosaic virus 2, Weddel water-borne virus, Weldona virus, Wesselsbron virus, West Nile virus, western equine encephalitis virus, western equine encephalomyelitis virus, Wexford virus, Whataroa virus, Wheat American striate mosaic virus, Wheat chlorotic streak virus, Wheat dwarf virus, Wheat rosette stunt virus, Wheat streak mosaic virus, Wheat yellow leaf virus, Wheat yellow mosaic virus, White bryony virus, White clover cryptic virus 1, White clover cryptic virus 2, White clover cryptic virus 3, White clover mosaic virus, White lupinrnosaic virus, Wild cucumber mosaic virus, Wild potato mosaic virus, Wildbeest herpesvirus, Wineberry latent virus, Winter wheat mosaic virus, Winter wheat Russian mosaic virus, Wiseana cervinata virus, Wiseana signata virus, Wiseana umbraculata virus, Wissadula mosaic virus, Wisteria vein mosaic virus, Witwatersrand virus, Wongal virus, Wongorr virus, Winter Vomiting Virus, woodchuck hepatitis B virus, Woodchuck herpesvirus marmota 1, woolly monkey sarcoma virus, wound tumor virus, WRSV virus, WVU virus 2937, WW virus 71 to 212, Wyeomyia smithii NPV, Wyeomyia virus, Xanthomonas phage Cf, Xanthomonas phage Cflt, Xanthomonas phage RR66, Xanthomonas phage Xf, Xanthomonas phage Xf2, Xanthomonas phage XP5, Xenopus virus T21, Xiburema virus, Xingu virus, Xylena curvimacula NPV, Y73 sarcoma virus, Yaba monkey tumor virus, Yaba-1 virus, Yaba-7 virus, Yacaaba virus, Yam mosaic virus, Yaounde virus, Yaquina Head virus, Yatapoxvirus, Yellow fever virus, Yogue virus, Yokapox virus, Yokase virus, Yponomeuta cognatella NPV, Yponomeuta evonymella NPV, Yponomeuta malinellus NPV, Yponomeuta padella NPV, Yucca baciliform virus, Yug Bogdanovac virus, Zaliv Terpeniya virus, Zea mays virus, Zegla virus, Zeiraphera diniana virus, Zeiraphera pseudotsugana NPV, Zika virus, Zirqa virus, Zoysia mosaic virus, Zucchini yellow fleck virus, Zucchini yellow mosaic virus and Zygocactus virus.

1404. The method for vaccination according to any of claims 1293-1403, wherein the vaccination is for treatment of one or more diseases caused by one or more bacterial infection(s).

1405. The method for vaccination according to claim 1404, wherein bacterial infection is caused by one or more bacteria selected from the group consisting of Acidobacteria, Actinobacteria, Aquificae, Bacteroidetes, Chlamydiae, Chlorobi, Chloroflexi, Chrysiogenetes, Cyanobacteria, Deferribacteres, Deinococcus-Thermus, Dictyoglomi, Fibrobacteres, Firmicutes, Fusobacteria, Gemmatimonadetes, Nitrospirae, Planctomycetes, Proteobacteria, Spirochaetes, Thermodesulfobacteria, Thermomicrobia, Thermotogae and Verrucomicrobia bacterial phyla; these may be Gram negative (Spirochetal, Chlamydiae, Proteobacteria α, β, γ) and Gram positive bacteria (Firmicutes, Actinobacteria (Mycobacterium, Actinomycetales)).

1406. The method for vaccination according to any of claims 1404-1405, wherein bacterial infection is caused by one or more bacteria selected from the group consisting of Acetobacter aurantius, Acinetobacter species, Acinetobacter baumannii, Acinetobacter calcoaceticus, Acinetobacter johnsonii, Acinetobacter junii, Acinetobacter lwoffii, Acinetobacter radioresistens, Acinetobacter septicus, Acinetobacter schindleri, Acinetobacter ursingii; Actinomyces species: Actinomyces bovis, Actinomyces bowdenii, Actinomyces canis, Actinomyces cardiffensis, Actinomyces catuli, Actinomyces coleocanis, Actinomyces dentalis, Actinomyces denticolens, Actinomyces europaeus, Actinomyces funkei, Actinomyces georgiae, Actinomyces gerencseriae, Actinomyces graevenitzii, Actinomyces hongkongensis, Actinomyces hordeovulneris, Actinomyces howellii, Actinomyces humiferus, Actinomyces hyovaginalis, Actinomyces israelii, Actinomyces marimammalium, Actinomyces meyeri, Actinomyces naeslundii, Actinomyces nasicola, Actinomyces neuii, Actinomyces odontolyticus, Actinomyces oricola, Actinomyces radicidentis, Actinomyces radingae, Actinomyces slackii, Actinomyces streptomycini, Actinomyces suimastitidis, Actinomyces suis, Actinomyces turicensis, Actinomyces urogenitalis, Actinomyces vaccimaxillae, Actinomyces viscosus; Actinobacillus species: Actinobacillus actinomycetemcomitans, Actinobacillus arthritidis, Actinobacillus capsulatus, Actinobacillus delphinicola, Actinobacillus equuli, Actinobacillus hominis, Actinobacillus indolicus, Actinobacillus lignieresii, Actinobacillus minor, Actinobacillus muris, Actinobacillus pleuropneumoniae, Actinobacillus porcinus, Actinobacillus rossii, Actinobacillus scotiae, Actinobacillus seminis, Actinobacillus succinogenes, Actinobacillus suis, Actinobacillus ureae; Aeromonas species: Aeromonas allosaccharophila, Aeromonas bestiarum, Aeromonas bivalvium, Aeromonas encheleia, Aeromonas enteropelogenes, Aeromonas euchrenophila, Aeromonas hydrophila, Aeromonas ichthiosmia, Aeromonas jandaei, Aeromonas media, Aeromonas molluscorum, Aeromonas popoffii, Aeromonas punctata, Aeromonas salmonicida, Aeromonas schubertii, Aeromonas sharmana, Aeromonas simiae, Aeromonas sobria, Aeromonas veronii; Afipia felis, Agrobacterium species, Agrobacterium radiobacter, Agrobacterium rhizogenes, Agrobacterium rubi, Agrobacterium tumefaciens; Agromonas species, Alcaligenes species: Alcaligenes aquatilis, Alcaligenes eutrophus, Alcaligenes faecalis, Alcaligenes latus, Alcaligenes xylosoxidans; Alishewanella species, Alterococcus species, Anaplasma phagocytophilum, Anaplasma marginale, Aquamonas species, Arcanobacterium haemolyticum, Aranicola species, Arsenophonus species, Azotivirga species, Azotobacter vinelandii, Azotobacter chroococcum, Bacillary dysentery (Shigellosis), Bacillus species: Bacillus abortus (Brucella melitensis biovar abortus), Bacillus anthracis (Anthrax), Bacillus brevis, Bacillus cereus, Bacillus coagulans, Bacillus fusiformis, Bacillus globigii, Bacillus licheniformis, Bacillus megaterium, Bacillus mycoides, Bacillus natto, Bacillus stearothermophilus, Bacillus subtilis, Bacillus sphaericus, Bacillus thuringiensis; Bacteroides species: Bacteroides forsythus (Tannerella forsythensis), Bacteroides acidifaciens, Bacteroides distasonis (reclassified as Parabacteroides distasonis), Bacteroides gingivalis, Bacteroides gracilis, Bacteroides fragilis, Bacteroides oris, Bacteroides ovatus, Bacteroides putredinis, Bacteroides pyogenes, Bacteroides stercoris, Bacteroides suis, Bacteroides tectus, Bacteroides thetaiotaomicron, Bacteroides vulgatus; Bartonella species: Bartonella alsatica, Bartonella bacilliformis, Bartonella birtlesii, Bartonella bovis, Bartonella capreoli, Bartonella clarridgeiae, Bartonella doshiae, Bartonella elizabethae, Bartonella grahamii, Bartonella henselae (cat scratch fever), Bartonella koehlerae, Bartonella muris, Bartonella peromysci, Bartonella quintana, Bartonella rochalimae, Bartonella schoenbuchii, Bartonella talpae, Bartonella taylorii, Bartonella tribocorum, Bartonella vinsonii spp. Arupensis, Bartonella vinsonii spp. Berkhoffii, Bartonella vinsonii spp. Vinsonii, Bartonella washoensis; BCG (Bacille Calmette-Guerin), Bergeyella zoohelcum (Weeksella zoohelcum), Bifidobacterium bifidum, Blastobacter species, Blochmannia species, Bordetella species: ‘Bordetella ansorpii’, Bordetella avium, Bordetella bronchiseptica, Bordetella hinzii, Bordetella holmesii, Bordetella parapertussis, Bordetella pertussis (Whooping cough), Bordetella petrii, Bordetella trematum; Borrelia species: Borrelia anserine, Borrelia barbouri, Borrelia burgdorferi such as burgdorferi B31, Borrelia afzelii such as Borrelia afzelii ACA-1, Borrelia afzelii K78 and/or Borrelia afzelii PKo, Borrelia andersonii, Borrelia anserine, Borrelia bissettii, Borrelia burgdorferi 118a, Borrelia burgdorferi 156a, Borrelia burgdorferi 29805, Borrelia burgdorferi 64b, Borrelia burgdorferi 72a, Borrelia burgdorferi 80a, Borrelia burgdorferi 94a, Borrelia burgdorferi B31, Borrelia burgdorferi Bol26, Borrelia burgdorferi CA-11.2a, Borrelia burgdorferi WI91-23, Borrelia burgdorferi ZS7, Borrelia californiensis, Borrelia garini such as garini PBi, garini PBr, Borrelia genomosp. 1, Borrelia genomosp. 2, Borrelia japonica, Borrelia lusitaniae, Borrelia spielmanii, Borrelia spielmanii A14S, Borrelia tanukii, Borrelia turdi, Borrelia valaisiana, Borrelia valaisiana VS116, Candidatus Borrelia texasensis, Borrelia sp. AA4Pool, Borrelia sp. AI-1, Borrelia sp. B31, Borrelia sp. BC-1, Borrelia sp. CA1133, Borrelia sp. CA1176, Borrelia sp. CA128, Borrelia sp. CA13, Borrelia sp. CA134, Borrelia sp. CA142, Borrelia sp. CA20, Borrelia sp. CA22, Borrelia sp. CA27, Borrelia sp. CA28, Borrelia sp. CA29, Borrelia sp. CA31, Borrelia sp. CA33, Borrelia sp. CA370, Borrelia sp. CA372, Borrelia sp. CA378, Borrelia sp. CA388, Borrelia sp. CA393, Borrelia sp. CA394, Borrelia sp. CA395, Borrelia sp. CA399, Borrelia sp. CA400, Borrelia sp. CA401, Borrelia sp. CA402, Borrelia sp. CA404, Borrelia sp. CA411, Borrelia sp. CA426, Borrelia sp. CA443, Borrelia sp. CA446, Borrelia sp. CA448, Borrelia sp. CA462, Borrelia sp. CA468, Borrelia sp. CA502, Borrelia sp. CA504, Borrelia sp. CA507, Borrelia sp. CA547, Borrelia sp. CA552, Borrelia sp. CA8, Borrelia sp. D22, Borrelia sp. D35, Borrelia sp. FD-1, Borrelia sp. FL18, Borrelia sp. FL27, Borrelia sp. FL35, Borrelia sp. FL42., Borrelia sp. HN6, Borrelia sp. HN7, Borrelia sp. HN8, Borrelia sp. HNM13, Borrelia sp. HNM14, Borrelia sp. HNM19, Borrelia sp. IA1, Borrelia sp. Ir-3519, Borrelia sp. Ir-4721, Borrelia sp. Ir-4812, Borrelia sp. Ir-5215, Borrelia sp. LV5, Borrelia sp. MI-2, Borrelia sp. MI-5, Borrelia sp. MI-6, Borrelia sp. MI-8, Borrelia sp. MI-9, Borrelia sp. MOD-1, Borrelia sp. MOD-5, Borrelia sp. MOK-3a, Borrelia sp. MOS-1b, Borrelia sp. NE49, Borrelia sp. NE581, Borrelia sp. PHaP, Borrelia sp. PSigII, Borrelia sp. SCGT-10, Borrelia sp. SCGT-8a, Borrelia sp. SCI-2, Borrelia sp. SCW-30h, Borrelia sp. SI-1, Borrelia sp. SI-10, Borrelia sp. SM-1, Borrelia sp. SV1, Borrelia sp. W97F51, Borrelia sp. Z41293, Borrelia sp. Z41493, Borrelia coriaceae, Borrelia crocidurae, Borrelia duttonii, Borrelia duttonii Ly, Borrelia hermsii, Borrelia hermsii DAH, Borrelia hispanica, Borrelia lonestari, Borrelia miyamotoi, Borrelia parkeri, Borrelia persica, Borrelia recurrentis, Borrelia recurrentis A1, Borrelia sinica, Borrelia theileri, Borrelia turcica, Borrelia turicatae, Borrelia turicatae 91E135, Borrelia sp., Borrelia sp. ‘Lake Gaillard’, Borrelia sp. 000133, Borrelia sp. 010298, Borrelia sp. 10MT, Borrelia sp. 5145, Borrelia sp. 57Nsk, Borrelia sp. 5MT, Borrelia sp. 6T04-2, Borrelia sp. BR Borrelia sp. BR 2007, Borrelia sp. C5-N52, Borrelia sp. CB-A1, Borrelia sp. CB-A11, Borrelia sp. CB-A3, Borrelia sp. EFL-S0100110, Borrelia sp. IK/23, Borrelia sp. IM/16, Borrelia sp. IM/19, Borrelia sp. KR1, Borrelia sp. KR3, Borrelia sp. LB-2001, Borrelia sp. LB-M56, Borrelia sp. LB-W100, Borrelia sp. MK-N61, Borrelia sp. NR-N8, Borrelia sp. OkME1, Borrelia sp. PAnz, Borrelia sp. PJes, Borrelia sp. PMai, Borrelia sp. PMew, Borrelia sp. R57, Borrelia sp. strain Spain, Borrelia sp. TA1, Borrelia sp. TM, Borrelia sp. TM1 and Borrelia sp. TM2; Bosea species, Bradyrhizobium species, Brenneria species, Brucella species: Brucella abortus, Brucella canis, Brucella melitensis, Brucella neotomae, Brucella ovis, Brucella suis, Brucella pinnipediae; Buchnera species, Budvicia species, Burkholderia species: Burkholderia cepacia (Pseudomonas cepacia), Burkholderia mallei (Pseudomonas mallei/Actinobacillus mallei), Burkholderia pseudomallei (Pseudomonas pseudomallei); Buttiauxella species, Calymmatobacterium granulomatis, Campylobacter species: Campylobacter coli, Campylobacter concisus, Campylobacter curvus, Campylobacter fetus, Campylobacter gracilis, Campylobacter helveticus, Campylobacter hominis, Campylobacter hyointestinalis, Campylobacter insulaenigrae, Campylobacter jejuni, Campylobacter lanienae, Campylobacter lari, Campylobacter mucosalis, Campylobacter rectus, Campylobacter showae, Campylobacter sputorum, Campylobacter upsaliensis; Capnocytophaga canimorsus (Dysgonic fermenter type 2), Corynebacterium species, Cardiobacterium hominis, Cedecea species, Chlamydia species: Chlamydia trachomatis (Lymphogranuloma venereum), Chlamydia muridarum, Chlamydia suis; Chlamydophila species: Chlamydophila pneumoniae, Chlamydophila psittaci (Psittacosis), Chlamydophila pecorum, Chlamydophila abortus, Chlamydophila felis, Chlamydophila caviae; Citrobacter species: Citrobacter amalonaticus, Citrobacter braakii, Citrobacter farmeri, Citrobacter freundii, Citrobacter gillenii, Citrobacter intermedius, Citrobacter koseri aka Citrobacter diversus, Citrobacter murliniae, Citrobacter rodentium, Citrobacter sedlakii, Citrobacter werkmanii, Citrobacter youngae; Clostridium species: Clostridium botulinum, Clostridium difficile, Clostridium novyi, Clostridium septicum, Clostridium tetani (Tetanus), Clostridium welchii (Clostridium perfringens); Corynebacterium species: Corynebacterium diphtheriae (Diphtheria), Corynebacterium amycolatum, Corynebacterium aquaticum, Corynebacterium bovis, Corynebacterium equi, Corynebacterium flavescens, Corynebacterium glutamicum, Corynebacterium haemolyticum, Corynebacterium jeikeiun (corynebacteria of group JK), Corynebacterium minutissimum (Erythrasma), Corynebacterium parvum (also called Propionibacterium acnes), Corynebacterium pseudodiptheriticum (also called Corynebacterium hofmannii), Corynebacterium pseudotuberculosis (also called Corynebacterium ovis), Corynebacterium pyogenes, Corynebacterium urealyticum (corynebacteria of group D2), Corynebacterium renale, Corynebacterium striatum, Corynebacterium tenuis (Trichomycosis palmellina, Trichomycosis axillaris), Corynebacterium ulcerans, Corynebacterium xerosis; Coxiella burnetii (Q fever), Cronobacter species: Cronobacter sakazakii, Cronobacter malonaticus, Cronobacter turicensis, Cronobacter muytjensii, Cronobacter dublinensis; Delftia acidovorans (Comamonas acidovorans), Dickeya species, Edwardsiella species, Eikenella corrodens, Enterobacter species: Enterobacter aerogenes, Enterobacter cloacae, Enterobacter sakazakii; Enterococcus species: Enterococcus avium, Enterococcus durans, Enterococcus faecalis (Streptococcus faecalis/Streptococcus Group D), Enterococcus faecium, Enterococcus solitarius, Enterococcus galllinarum, Enterococcus maloratus; Ehrlichia chaffeensis, Erysipelothrix rhusiopathiae, Erwinia species, Escherichia species: Escherichia adecarboxylata, Escherichia albertii, Escherichia blattae, Escherichia coli, Escherichia fergusonii, Escherichia hermannii, Escherichia vulneris; Ewingella species, Flavobacterium species: Flavobacterium aquatile, Flavobacterium branchiophilum, Flavobacterium columnare, Flavobacterium flevense, Flavobacterium gondwanense, Flavobacterium hydatis, Flavobacterium johnsoniae, Flavobacterium pectinovorum, Flavobacterium psychrophilum, Flavobacterium saccharophilum, Flavobacterium salegens, Flavobacterium scophthalmum, Flavobacterium succinans; Francisella tularensis (Tularaemia), Francisella novicida, Francisella philomiragia, Fusobacterium species: Fusobacterium necrophorum (Lemierre syndrome/Sphaerophorus necrophorus), Fusobacterium nucleatum, Fusobacterium polymorphum, Fusobacterium novum, Fusobacterium mortiferum, Fusobacterium varium; Gardnerella vaginalis, Gemella haemolysans, Gemella morbillorum (Streptococcus morbillorum), Grimontella species, Haemophilus species: Haemophilus aegyptius (Koch-Weeks bacillus), Haemophilus aphrophilus, Haemophilus avium, Haemophilus ducreyi (Chancroid), Haemophilus felis, Haemophilus haemolyticus, Haemophilus influenzae (Pfeiffer bacillus), Haemophilus paracuniculus, Haemophilus parahaemolyticus, Haemophilus parainfluenzae, Haemophilus paraphrophilus (Aggregatibacter aphrophilus), Haemophilus pertussis, Haemophilus pittmaniae, Haemophilus somnus, Haemophilus vaginalis; Hafnia species, Hafnia alvei, Helicobacter species: Helicobacter acinonychis, Helicobacter anseris, Helicobacter aurati, Helicobacter bilis, Helicobacter bizzozeronii, Helicobacter brantae, Helicobacter Canadensis, Helicobacter canis, Helicobacter cholecystus, Helicobacter cinaedi, Helicobacter cynogastricus, Helicobacter felis, Helicobacter fennelliae, Helicobacter ganmani, Helicobacter heilmannii (Gastrospirillum hominis), Helicobacter hepaticus, Helicobacter mesocricetorum, Helicobacter marmotae, Helicobacter muridarum, Helicobacter mustelae, Helicobacter pametensis, Helicobacter pullorum, Helicobacter pylori (stomach ulcer), Helicobacter rappini, Helicobacter rodentium, Helicobacter salomonis, Helicobacter trogontum, Helicobacter typhlonius, Helicobacter winghamensis; Human granulocytic ehrlichiosis (Anaplasma phagocytophilum/Ehrlichia phagocytophila), Human monocytotropic ehrlichiosis (Monocytic ehrlichiosis/Ehrlichia chaffeensis), Klebsiella species: Klebsiella granulomatis (Calymmatobacterium granulomatis), Klebsiella mobilis, Klebsiella ornithinolytica, Klebsiella oxytoca, Klebsiella ozaenae, Klebsiella planticola, Klebsiella pneumoniae, Klebsiella rhinoscleromatis, Klebsiella singaporensis, Klebsiella terrigena, Klebsiella trevisanii, Klebsiella variicola; Kingella kingae, Kluyvera species, Lactobacillus species: Lactobacillus acetotolerans, Lactobacillus acidifarinae, Lactobacillus acidipiscis, Lactobacillus acidophilus (Doderlein bacillus), Lactobacillus agilis, Lactobacillus algidus, Lactobacillus alimentarius, Lactobacillus amylolyticus, Lactobacillus amylophilus, Lactobacillus amylotrophicus, Lactobacillus amylovorus, Lactobacillus animalis, Lactobacillus antri, Lactobacillus apodemi, Lactobacillus aviarius, Lactobacillus bifermentans, Lactobacillus brevis, Lactobacillus buchneri, Lactobacillus camelliae, Lactobacillus casei, Lactobacillus catenaformis, Lactobacillus ceti, Lactobacillus coleohominis, Lactobacillus collinoides, Lactobacillus composti, Lactobacillus concavus, Lactobacillus coryniformis, Lactobacillus crispatus, Lactobacillus crustorum, Lactobacillus curvatus, Lactobacillus delbrueckii, Lactobacillus delbrueckii subsp. Bulgaricus, Lactobacillus delbrueckii subsp. Lactis, Lactobacillus diolivorans, Lactobacillus equi, Lactobacillus equigenerosi, Lactobacillus farraginis, Lactobacillus farciminis, Lactobacillus fermentum, Lactobacillus formicalis, Lactobacillus fructivorans, Lactobacillus frumenti, Lactobacillus fuchuensis, Lactobacillus gallinarum, Lactobacillus gasseri, Lactobacillus gastricus, Lactobacillus ghanensis, Lactobacillus graminis, Lactobacillus hammesii, Lactobacillus hamsteri, Lactobacillus harbinensis, Lactobacillus hayakitensis, Lactobacillus helveticus, Lactobacillus hilgardii, Lactobacillus homohiochii, Lactobacillus iners, Lactobacillus ingluviei, Lactobacillus intestinalis, Lactobacillus jensenii, Lactobacillus johnsonii, Lactobacillus kalixensis, Lactobacillus kefuranofaciens, Lactobacillus kefiri, Lactobacillus kimchii, Lactobacillus kitasatonis, Lactobacillus kunkeei, Lactobacillus leichmannii, Lactobacillus lindneri, Lactobacillus malefermentans, Lactobacillus mali, Lactobacillus manihotivorans, Lactobacillus mindensis, Lactobacillus mucosae, Lactobacillus murinus, Lactobacillus nagelii, Lactobacillus namurensis, Lactobacillus nantensis, Lactobacillus oligofermentans, Lactobacillus oris, Lactobacillus panis, Lactobacillus pantheris, Lactobacillus parabrevis, Lactobacillus parabuchneri, Lactobacillus paracollinoides, Lactobacillus parafarraginis, Lactobacillus parakefiri, Lactobacillus paralimentarius, Lactobacillus paraplantarum, Lactobacillus pentosus, Lactobacillus perolens, Lactobacillus plantarum, Lactobacillus pontis, Lactobacillus psittaci, Lactobacillus rennini, Lactobacillus reuteri, Lactobacillus rhamnosus, Lactobacillus rimae, Lactobacillus rogosae, Lactobacillus rossiae, Lactobacillus ruminis, Lactobacillus saerimneri, Lactobacillus sakei, Lactobacillus salivarius, Lactobacillus sanfranciscensis, Lactobacillus satsumensis, Lactobacillus secaliphilus, Lactobacillus sharpeae, Lactobacillus siliginis, Lactobacillus spicheri, Lactobacillus suebicus, Lactobacillus thailandensis, Lactobacillus ultunensis, Lactobacillus vaccinostercus, Lactobacillus vaginalis, Lactobacillus versmoldensis, Lactobacillus vini, Lactobacillus vitulinus, Lactobacillus zeae, Lactobacillus zymae; Leclercia species, Legionella species: Legionella adelaidensis, Legionella anisa, Legionella beliardensis, Legionella birminghamensis, Legionella bozemanii, Legionella brunensis, Legionella busanensis, Legionella cherrii, Legionella cincinnatiensis, Legionella donaldsonii, Legionella drancourtii, Legionella drozanskii, Legionella erythra, Legionella fairfieldensis, Legionella fallonii, Legionella feeleii, Legionella geestiana, Legionella genomospecies, Legionella gratiana, Legionella gresilensis, Legionella hackeliae, Legionella impletisoli, Legionella israelensis, Legionella jamestowniensis, ‘Candidatus Legionella jeonii’, Legionella jordanis, Legionella lansingensis, Legionella londiniensis, Legionella longbeachae, Legionella lytica, Legionella maceachernii, Legionella micdadei, Legionella moravica, Legionella nautarum, Legionella oakridgensis, Legionella parisiensis, Legionella pneumophila, Legionella quateirensis, Legionella quinlivanii, Legionella rowbothamii, Legionella rubrilucens, Legionella sainthelensi, Legionella santicrucis, Legionella shakespearei, Legionella spiritensis, Legionella steigerwaltii, Legionella taurinensis, Legionella tucsonensis, Legionella wadsworthii, Legionella waltersii, Legionella worsleiensis, Legionella yabuuchiae; Leminorella species, Leptospira species: Leptospira interrogans, Leptospira kirschneri, Leptospira noguchii, Leptospira alexanderi, Leptospira weilii, Leptospira genomospecies 1, Leptospira borgpetersenii, Leptospira santarosai, Leptospira inadai, Leptospira fainei, Leptospira broomii, Leptospira licerasiae, Leptospira biflexa, Leptospira meyeri, Leptospira wolbachii, Leptospira genomospecies 3, Leptospira genomospecies 4, Leptospira genomospecies 5; Lepromatous leprosy (Danielssen-Boeck disease), Leptospira canicola, Leptospira hebdomadis, Leptospirosis (Weil disease/Leptospira icterohaemorrhagiae/Leptospira interrogans serovar icterohaemorrhagiae), Leptotrichia, Leuconostoc species: Leuconostoc carnosum, Leuconostoc citreum, Leuconostoc durionis, Leuconostoc fallax, Leuconostoc ficulneum, Leuconostoc fructosum, Leuconostoc garlicum, Leuconostoc gasicomitatum, Leuconostoc gelidum, Leuconostoc inhae, Leuconostoc kimchii, Leuconostoc lactis, Leuconostoc mesenteroides, Leuconostoc pseudoficulneum, Leuconostoc pseudomesenteroides; Listeria species: Listeria grayi, Listeria innocua, Listeria ivanovii, Listeria monocytogenes (Listeriosis), Listeria seeligeri, Listeria welshimeri; Methanobacterium extroquens, Microbacterium multiforme, Micrococcus species: Micrococcus antarcticus, Micrococcus flavus, Micrococcus luteus, Micrococcus lylae, Micrococcus mucilaginosis, Micrococcus roseus, Micrococcus sedentarius; Mobiluncus, Moellerella species, Morganella species, Moraxella species: Moraxella atlantae, Moraxella boevrei, Moraxella bovis, Moraxella canis, Moraxella caprae, Moraxella catarrhalis (Branhamella catarrhalis), Moraxella caviae, Moraxella cuniculi, Moraxella equi, Moraxella lacunata, Moraxella lincolnii, Moraxella nonliquefaciens, Moraxella oblonga, Moraxella osloensis, Moraxella saccharolytica; Morganella morganii, Mycobacterium species: Mycobacterium abscessus, Mycobacterium africanum, Mycobacterium agri, Mycobacterium aichiense, Mycobacterium alvei, Mycobacterium arupense, Mycobacterium asiaticum, Mycobacterium aubagnense, Mycobacterium aurum, Mycobacterium austroafricanum, Mycobacterium avium (Battey disease/Lady Windermere syndrome), Mycobacterium avium paratuberculosis (implicated in Crohn's disease in humans and Johne's disease in sheep), Mycobacterium avium silvaticum, Mycobacterium avium “hominissuis”, Mycobacterium colombiense, Mycobacterium boenickei, Mycobacterium bohemicum, Mycobacterium bolletii, Mycobacterium botniense, Mycobacterium bovis (Bovine tuberculosis), Mycobacterium branderi, Mycobacterium brisbanense, Mycobacterium brumae, Mycobacterium canariasense, Mycobacterium caprae, Mycobacterium celatum, Mycobacterium chelonae, Mycobacterium chimaera, Mycobacterium chitae, Mycobacterium chlorophenolicum, Mycobacterium chubuense, Mycobacterium conceptionense, Mycobacterium confluentis, Mycobacterium conspicuum, Mycobacterium cookii, Mycobacterium cosmeticum, Mycobacterium diernhoferi, Mycobacterium doricum, Mycobacterium duvalii, Mycobacterium elephantis, Mycobacterium fallax, Mycobacterium farcinogenes, Mycobacterium flavescens, Mycobacterium florentinum, Mycobacterium fluoroanthenivorans, Mycobacterium fortuitum, Mycobacterium fortuitum subsp. Acetamidolyticum, Mycobacterium frederiksbergense, Mycobacterium gadium, Mycobacterium gastri, Mycobacterium genavense, Mycobacterium gilvum, Mycobacterium goodii, Mycobacterium gordonae (Mycobacterium aquae), Mycobacterium haemophilum, Mycobacterium hassiacum, Mycobacterium heckeshornense, Mycobacterium heidelbergense, Mycobacterium hiberniae, Mycobacterium hodleri, Mycobacterium holsaticum, Mycobacterium houstonense, Mycobacterium immunogenum, Mycobacterium interjectum, Mycobacterium intermedium, Mycobacterium intracellulare, Mycobacterium kansasii, Mycobacterium komossense, Mycobacterium kubicae, Mycobacterium kumamotonense, Mycobacterium lacus, Mycobacterium lentiflavum, Mycobacterium leprae (causes leprosy or Hansen disease/Hanseniasis), Mycobacterium lepraemurium, Mycobacterium madagascariense, Mycobacterium mageritense, Mycobacterium malmoense, Mycobacterium marinum (Fish tank granuloma), Mycobacterium massiliense, Mycobacterium microti, Mycobacterium monacense, Mycobacterium montefiorense, Mycobacterium moriokaense, Mycobacterium mucogenicum, Mycobacterium murale, Mycobacterium nebraskense, Mycobacterium neoaurum, Mycobacterium neworleansense, Mycobacterium nonchromogenicum, Mycobacterium novocastrense, Mycobacterium obuense, Mycobacterium palustre, Mycobacterium parafortuitum, Mycobacterium parascrofulaceum, Mycobacterium parmense, Mycobacterium peregrinum, Mycobacterium phlei, Mycobacterium phocaicum, Mycobacterium pinnipedii, Mycobacterium porcinum, Mycobacterium poriferae, Mycobacterium pseudoshottsii, Mycobacterium pulveris, Mycobacterium psychrotolerans, Mycobacterium pyrenivorans, Mycobacterium rhodesiae, Mycobacterium saskatchewanense, Mycobacterium scrofulaceum, Mycobacterium senegalense, Mycobacterium seoulense, Mycobacterium septicum, Mycobacterium shimoidei, Mycobacterium shottsii, Mycobacterium simiae, Mycobacterium smegmatis, Mycobacterium sphagni, Mycobacterium szulgai, Mycobacterium terrae, Mycobacterium thermoresistibile, Mycobacterium tokaiense, Mycobacterium triplex, Mycobacterium triviale, Mycobacterium tuberculosis (major cause of human tuberculosis), Mycobacterium bovis, Mycobacterium africanum, Mycobacterium canetti, Mycobacterium caprae, Mycobacterium pinnipedii', Mycobacterium tusciae, Mycobacterium ulcerans (causes Bairnsdale ulcer/Buruli ulcer), Mycobacterium vaccae, Mycobacterium vanbaalenii, Mycobacterium wolinskyi, Mycobacterium xenopi; Mycoplasma species: Mycoplasma fermentans, Mycoplasma genitalium, Mycoplasma hominis, Mycoplasma penetrans, Mycoplasma phocacerebrale, Mycoplasma pneumoniae, Nanukayami (Seven-day fever/Gikiyami), Neisseria species: Neisseria gonorrhoea (Gonococcus/Gonorrhea), Neisseria meningiditis (Meningococcus), Neisseria sicca, Neisseria cinerea, Neisseria elongata, Neisseria flavescens, Neisseria lactamica, Neisseria mucosa, Neisseria polysaccharea, Neisseria subflava; Nitrobacter species, Nocardia species: Nocardia asteroides, Nocardia brasiliensis, Nocardia caviae; Noma (cancrum oris/gangrenous stomatitis), Obesumbacterium, Oligotropha species, Orientia tsutsugamushi (Scrub typhus), Oxalobacter formigenes, Pantoea species: Pantoea agglomerans, Pantoea ananatis, Pantoea citrea, Pantoea dispersa, Pantoea punctata, Pantoea stewartii, Pantoea terrea; Pasteurella species: Pasteurella aerogenes, Pasteurella anatis, Pasteurella avium, Pasteurella bettyae, Pasteurella caballi, Pasteurella canis, Pasteurella dagmatis, Pasteurella gallicida, Pasteurella gallinarum, Pasteurella granulomatis, Pasteurella langaaensis, Pasteurella lymphangitidis, Pasteurella mairii, Pasteurella multocida, Pasteurella pneumotropica, Pasteurella skyensis, Pasteurella stomatis, Pasteurella testudinis, Pasteurella trehalosi, Pasteurella tularensis, Pasteurella ureae, Pasteurella volantium; Pediococcus species: Pediococcus acidilactici, Pediococcus cellicola, Pediococcus claussenii, Pediococcus damnosus, Pediococcus dextrinicus, Pediococcus ethanolidurans, Pediococcus inopinatus, Pediococcus parvulus, Pediococcus pentosaceus, Pediococcus stilesii; Peptostreptococcus species: Peptostreptococcus anaerobius, Peptostreptococcus asaccharolyticus, Peptostreptococcus harei, Peptostreptococcus hydrogenalis, Peptostreptococcus indoliticus, Peptostreptococcus ivorii, Peptostreptococcus lacrimalis, Peptostreptococcus lactolyticus, Peptostreptococcus magnus, Peptostreptococcus micros, Peptostreptococcus octavius, Peptostreptococcus prevotii, Peptostreptococcus tetradius, Peptostreptococcus vaginalis; Photorhabdus species, Photorhizobium species, Plesiomonas shigelloides, Porphyromonas gingivalis, Pragia species, Prevotella, Propionibacterium species: Propionibacterium acnes, Propionibacterium propionicus; Proteus species: Proteus mirabilis, Proteus morganii, Proteus penneri, Proteus rettgeri, Proteus vulgaris; Providencia species: Providencia friedericiana, Providencia stuartii; Pseudomonas species: Pseudomonas aeruginosa, Pseudomonas alcaligenes, Pseudomonas anguilliseptica, Pseudomonas argentinensis, Pseudomonas borbori, Pseudomonas citronellolis, Pseudomonas flavescens, Pseudomonas mendocina, Pseudomonas nitroreducens, Pseudomonas oleovorans, Pseudomonas pseudoalcaligenes, Pseudomonas resinovorans, Pseudomonas straminea, Pseudomonas aurantiaca, Pseudomonas aureofaciens, Pseudomonas chlororaphis, Pseudomonas fragi, Pseudomonas lundensis, Pseudomonas taetrolens, Pseudomonas Antarctica, Pseudomonas azotoformans, Pseudomonas brassicacearum, Pseudomonas brenneri, Pseudomonas cedrina, Pseudomonas corrugate, Pseudomonas fluorescens, Pseudomonas gessardii, Pseudomonas libanensis, Pseudomonas mandelii, Pseudomonas marginalis, Pseudomonas mediterranea, Pseudomonas meridiana, Pseudomonas migulae, Pseudomonas mucidolens, Pseudomonas orientalis, Pseudomonas panacis, Pseudomonas proteolytica, Pseudomonas rhodesiae, Pseudomonas synxantha, Pseudomonas thivervalensis, Pseudomonas tolaasii, Pseudomonas veronii, Pseudomonas denitrificans, Pseudomonas pertucinogena, Pseudomonas cremoricolorata, Pseudomonas fulva, Pseudomonas monteilii, Pseudomonas mosselii, Pseudomonas oryzihabitans, Pseudomonas parafulva, Pseudomonas plecoglossicida, Pseudomonas putida, Pseudomonas balearica, Pseudomonas luteola, Pseudomonas stutzeri, Pseudomonas amygdale, Pseudomonas avellanae, Pseudomonas caricapapayae, Pseudomonas cichorii, Pseudomonas coronafaciens, Pseudomonas ficuserectae, Pseudomonas meliae, Pseudomonas savastanoi, Pseudomonas syringae, Pseudomonas viridiflava, Pseudomonas abietaniphila, Pseudomonas acidophila, Pseudomonas agarici, Pseudomonas alcaliphila, Pseudomonas alkanolytica, Pseudomonas amyloderamosa, Pseudomonas asplenii, Pseudomonas azotifigens, Pseudomonas cannabina, Pseudomonas coenobios, Pseudomonas congelans, Pseudomonas costantinii, Pseudomonas cruciviae, Pseudomonas delhiensis, Pseudomonas excibis, Pseudomonas extremorientalis, Pseudomonas frederiksbergensis, Pseudomonas fuscovaginae, Pseudomonas gelidicola, Pseudomonas grimontii, Pseudomonas indica, Pseudomonas jessenii, Pseudomonas jinjuensis, Pseudomonas kilonensis, Pseudomonas knackmussii, Pseudomonas koreensis, Pseudomonas lini, Pseudomonas lutea, Pseudomonas moraviensis, Pseudomonas otitidis, Pseudomonas pachastrellae, Pseudomonas palleroniana, Pseudomonas papaveris, Pseudomonas peli, Pseudomonas perolens, Pseudomonas poae, Pseudomonas pohangensis, Pseudomonas psychrophila, Pseudomonas psychrotolerans, Pseudomonas rathonis, Pseudomonas reptilivora, Pseudomonas resiniphila, Pseudomonas rhizosphaerae, Pseudomonas rubescens, Pseudomonas salomonii, Pseudomonas segitis, Pseudomonas septica, Pseudomonas simiae, Pseudomonas suis, Pseudomonas thermotolerans, Pseudomonas tremae, Pseudomonas trivialis, Pseudomonas turbinellae, Pseudomonas tuticorinensis, Pseudomonas umsongensis, Pseudomonas vancouverensis, Pseudomonas vranovensis, Pseudomonas xanthomarina; Rahnella species, Ralstonia species: Ralstonia basilensis, Ralstonia campinensis, Ralstonia eutropha, Ralstonia gilardii, Ralstonia insidiosa, Ralstonia mannitolilytica, Ralstonia metallidurans, Ralstonia paucula, Ralstonia pickettii, Ralstonia respiraculi, Ralstonia solanacearum, Ralstonia syzygii, Ralstonia taiwanensis; Raoultella species, Rhodoblastus species, Rhodopseudomonas species, Rhinoscleroma, Rhizobium radiobacter, Rhodococcus equi, Rickettsia species: Rickettsia africae, Rickettsia akari, Rickettsia australis, Rickettsia conorii, Rickettsia felis, Rickettsia japonica, Rickettsia mooseri, Rickettsia prowazekii (Typhus fever), Rickettsia rickettsii, Rickettsia siberica, Rickettsia typhi, Rickettsia conorii, Rickettsia africae, Rickettsia psittaci, Rickettsia quintana, Rickettsia rickettsii, Rickettsia trachomae; Rothia dentocariosa, Salmonella species: Salmonella arizonae, Salmonella Bongori, Salmonella enterica, Salmonella enteriditis, Salmonella paratyphi, Salmonella typhi (Typhoid fever), Salmonella typhimurium, Salmonella salamae, Salmonella arizonae, Salmonella diarizonae, Salmonella houtenae, Salmonella indica; Samsonia species, Serratia species: Serratia entomophila, Serratia ficaria, Serratia fonticola, Serratia grimesii, Serratia liquefaciens, Serratia marcescens, Serratia odoriferae, Serratia plymuthica, Serratia proteamaculans, Serratia quinivorans, Serratia rubidaea, Serratia ureilytica; Shewanella putrefaciens, Shigella boydii, Shigella dysenteriae, Shigella flexneri, Shigella sonnei, Sodalis species, Spirillum species: Spirillum minus rat bite fever, Staphylococcus species: Staphylococcus aureus, Staphylococcus auricularis, Staphylococcus capitis, Staphylococcus caprae, Staphylococcus cohnii, Staphylococcus epidermidis, Staphylococcus felis, Staphylococcus haemolyticus, Staphylococcus hominis, Staphylococcus intermedius, Staphylococcus lugdunensis, Staphylococcus pettenkoferi, Staphylococcus saprophyticus, Staphylococcus schleiferi, Staphylococcus simulans, Staphylococcus vitulus, Staphylococcus warneri, Staphylococcus xylosus; Stenotrophomonas species: Stenotrophomonas acidaminiphila, Stenotrophomonas dokdonensis, Stenotrophomonas koreensis, Stenotrophomonas maltophilia, Stenotrophomonas nitritireducens, Stenotrophomonas rhizophila; Streptobacillus species: Streptobacillus moniliformis (Streptobacillary rat bite fever); Streptococcus species: Streptococcus Group A, Streptococcus Group B, Streptococcus agalactiae, Streptococcus aginosus, Streptococcus avium, Streptococcus bovis, Streptococcus canis, Streptococcus cricetus, Streptococcus faceium, Streptococcus faecalis, Streptococcus ferus, Streptococcus gallinarum, Streptococcus lactis, Streptococcus milleri, Streptococcus mitior, Streptococcus mitis, Streptococcus mutans, Streptococcus oralis, Streptococcus peroris, Streptococcus pneumoniae, Streptococcus pyogenes, Streptococcus ratti, Streptococcus salivarius, Streptococcus sanguinis, Streptococcus sobrinus, Streptococcus parasanguinis, Streptococcus suis, Streptococcus thermophilus, Streptococcus vestibularis, Streptococcus viridans, Streptococcus uberis, Streptococcus zooepidemicus; Tatumella species, Trabulsiella species, Treponema species: Treponema carateum (Pinta), Treponema denticola, Treponema endemicum (Bejel), Treponema pallidum (Syphilis), Treponema pertenue (Yaws); Tropheryma whipplei (Whipple disease), Tuberculoid leprosy, Ureaplasma urealyticum, Veillonella, Vibrio species: Vibrio aerogenes, Vibrio aestuarianus, Vibrio agarivorans, Vibrio albensis, Vibrio alginolyticus, Vibrio brasiliensis, Vibrio calviensis, Vibrio campbellii, Vibrio chagasii, Vibrio cholerae (Cholera), Vibrio cincinnatiensis, Vibrio Comma, Vibrio coralliilyticus, Vibrio crassostreae, Vibrio cyclitrophicus, Vibrio diabolicus, Vibrio diazotrophicus, Vibrio ezurae, Vibrio fischeri, Vibrio fluvialis, Vibrio fortis, Vibrio furnissii, Vibrio gallicus, Vibrio gazogenes, Vibrio gigantis, Vibrio halioticoli, Vibrio harveyi, Vibrio hepatarius, Vibrio hispanicus, Vibrio ichthyoenteri, Vibrio kanaloae, Vibrio lentus, Vibrio litoralis, Vibrio logei, Vibrio mediterranei, Vibrio metschnikovii, Vibrio mimicus, Vibrio mytili, Vibrio natriegens, Vibrio navarrensis, Vibrio neonatus, Vibrio neptunius, Vibrio nereis, Vibrio nigripulchritudo, Vibrio ordalii, Vibrio orientalis, Vibrio pacinii, Vibrio parahaemolyticus, Vibrio pectenicida, Vibrio penaeicida, Vibrio pomeroyi, Vibrio ponticus, Vibrio proteolyticus, Vibrio rotiferianus, Vibrio ruber, Vibrio rumoiensis, Vibrio salmonicida, Vibrio scophthalmi, Vibrio splendidus, Vibrio superstes, Vibrio tapetis, Vibrio tasmaniensis, Vibrio tubiashii, Vibrio vulnificus, Vibrio wodanis, Vibrio xuii; Vogesella indigofera, Wigglesworthia species, Wolbachia species, Xenorhabdus species, Yersinia enterocolitica, Yersinia pestis, Yersinia pseudotuberculosis, and Yokenella species.

1407. The method for vaccination according to any of claims 1293-1406, wherein the vaccination is for treatment of one or more infectious diseases.

1408. The method for vaccination according to claim 1407, wherein the one or more infectious diseases can be selected from the group consisting of Bacteria and bacterial diseases (Specific kind of Infections), Fungus and fungal infections (Specific kind of Infections), Helminths and helminthic conditions (Specific kind of Infections), Prions and prion related diseases (Specific kind of Infections), Protozoa and protozoal infections (Specific kind of Infections), Viruses and viral disease (Specific kind of Infections), Abscess, Acariasis, actinomycetoma, Adenitis, Adenoiditis, African trypanosomiasis, Alpers Syndrome, Alphos, Alveolar osteitis, Amebiasis, Anorectal abscess, Anthrax, Ascariasis, Aspergillosis, Athlete's foot, Atypical pneumonia, Babesiosis, Bejel, Blastocystis hominis, Blastomycosis, Bolivian hemorrhagic fever, Botulism, Botryomycosis, Borna disease, Borreliosis (Lyme disease), Bovine spongiform encephalopathy, Brazilian purpuric fever (BPF), Bronchiolitis, Brucellosis, Bubonic plague, Buruli ulcer, Candidiasis, Campylobacteriosis, Cat scratch fever, Cellulitis, Chagas disease, Chalazion, Chickenpox (Varicella), Chikungunya, Cholangitis, Cholecystitis, Cholera, Clonorchiasis, Coccidioidomycosis, Colorado Tick Fever (CTF), Common cold, Creutzfeldt-Jakob disease, Crimean-Congo hemorrhagic fever, Cryptococcosis, Cryptosporidiosis, Cutaneous abscess, Cysticercosis, Cystitis, infective, Dengue fever, Dermatophytosis, Diarrheal diseases, Diphteria, Diphyllobothriasis, Discitis, Donovanosis, Dracunculiasis, Dukes' disease, Dysentery, Ebola hemorrhagic fever, Echinococcosis, Encephalitis, Enterobiasis, Epidural abscess, Erysipelas, Eumycetoma, Fascioliasis, Fatal Familial Insomnia, Filariasis, Finger pulp abscess, Fitz-Hugh-Curtis syndrome, Foodborne trematodiases, Foot-and-mouth disease, Gallbladder empyema, Gas gangrene, Gastroenteritis, Giardiasis, Glanders, Gnathostomiasis, Gonorrhea, Gradenigo-Lannois syndrome, Grisel syndrome, Helminthiasis, Hepatitis, Herpes simplex, Herpes zoster, HPV, Histoplasmosis, HIV/AIDS, Hookworm, Hordeolum externum, Human African trypanosomiasis, Hymenolepiasis, Impetigo, Infectious mononucleosis, Influenza, Intertrigo, Intracranial abscess/granuloma, Intraspinal abscess/granuloma, Isosporiasis, IV catheter infection, Japanese Encephalitis, Kuru, Kyasanur forest disease, Labrea fever, La Crosse encephalitis, Lacrimal canaliculitis, Lady Windermere syndrome, Laryngeal papillomatosis, Laryngitis, Lassa fever, Legionellosis, Leishmaniasis, Lemierre's syndrome, Leptospirosis, Leprosy, Listeriosis, Liver abscess, Loa loa filariasis, lobomycosis, Lower respiratory tract infection, Ludwig angina, Lung abscess, Lymphangitis, Lymphatic filariasis, Malaria, Marburg haemorrhagic fever, Measles, Mediastinitis, Melioidosis, Meningitis, Metagonimiasis, Mumps, Murrain, Mycetoma, Mycosis, Myiasis, Necrotizing fasciitis, Neurocysticercosis, Nocardiosis, Omphalitis, Onchocerciasis, Ophthalmia neonatorum, Orbital cellulitis, Oropouche fever, Oroya fever, Osteomyelitis, Paragonimiasis, Paratyphoid fevers, Pediculosis, Periorbital cellulitis, Periodontis, Pertussis (Whooping Cough), Pharyngitis, Pharyngoconjunctival fever, Phlegmon, Pigbel (enteritis necroticans), Pinta, Pinworm Infection, Plantar wart, Pneumonia, Pneumonic plague, Pogosta disease, Poliomyelitis, Pott's disease, Prostatitis, Protothecosis, Psittacosis, Pyelonephritis acute, Pyelonephritis chronic, Pyomyositis, Q fever, Quinsy, Rabies, Rat-bite fever, Relapsing fever, Retropharyngeal abscess, Rheumatic Fever, Rhinosporidiosis, Rickettsialpox, Rift Valley fever, Ringworm, Rodentoleposis, Rocky Mountain Spotted Fever (RMSF), Roseola, Rubella, Salmonellosis, Scabies, Scarlet fever, Schistosomiasis, Septicemic plague, Septic arthropathy, Septic shock, Sepsis, Severe acute respiratory syndrome (SARS), Sexually transmissable disease, Shigellosis, Smallpox (Variola), Sodoku, Spondylodiskitis, Strongyloidiasis, Subdiaphragmatic abscess, Subdural empyema, Suppurative thyroiditis, Surra, Sweating sickness, Syphilis, Taeniasis, Tetanus, Trachoma, Tick-borne diseases, Tinea barbae, Tinea capitis, Tinea corporis, Tinea cruris, Tinea faciei, Tinea manuum, Tinea nigra, Tinea pedis, Tinea versicolor, Tonsillitis, Toxocariasis, Toxoplasmosis, Tracheolaryngobronchitis, Trachoma, Transmissible spongiform encephalopathy, Traveler's diarrhea, Trench fever, Treponematoses, Trichinellosis, Trichinosis, Trichomoniasis, Trichuriasis, Tropical diseases, Trypanosomiasis, Tuberculosis (TB), Tularemia, Typhoid fever, Typhus, Upper respiratory tract infection, Urethritis, Urinary tract infection, Venezuelan hemorrhagic fever (VHF), Verruca plana, viral hemorrhagic fevers (VHFs), Wart, West Nile disease, Wound infection, Yaws, Yellow fever, Yersiniosis and Zygomycosis.

1409. The method for vaccination according to any of claims 1293-1408, wherein the vaccination is for treatment of one or more cancer diseases.

1410. The method for vaccination according to any of claims 1293-1409, wherein the vaccination is for prevention of one or more cancer diseases.

1411. The method for vaccination according to any of claims 1293-1410, wherein the vaccination is for amelioration of one or more cancer diseases.

1412. The method for vaccination according to any of claims 1409-1411, wherein the one or more cancer diseases can be selected from the group consisting of Acute Lymphoblastic Leukemia, Acute Myeloid Leukemia, Adrenocortical Carcinoma, AIDS-Related Cancers, AIDS-Related Lymphoma, Anal Cancer, Astrocytoma (e.g. Childhood Cerebellar or Childhood Cerebral), Basal Cell Carcinoma, Extrahepatic Bile Duct Cancer, Bladder Cancer, Bone Cancer, Osteosarcoma/Malignant Fibrous Histiocytoma, Brain Stem Glioma, Brain Tumor, Breast Cancer, Male Breast Cancer, Bronchial Adenomas/Carcinoids, Burkitt's Lymphoma, Carcinoid Tumor, Carcinoma of Unknown Primary, Primary Central Nervous System Lymphoma, Cerebral Astrocytoma/Malignant Glioma, Cervical Cancer, Childhood Cancers, Chronic Lymphocytic Leukemia, Chronic Myelogenous Leukemia, Chronic Myeloproliferative Disorders, Colon Cancer, Cutaneous T-Cell Lymphoma, Endometrial Cancer, Ependymoma (such as Childhood Ependymoma), Esophageal Cancer, Ewing's Family of Tumors, Extracranial Germ Cell Tumor (such as Childhood Extracranial Germ Cell Tumor), Extragonadal Germ Cell Tumor, Eye Cancer (Intraocular Melanoma or Retinoblastoma), Gallbladder Cancer, Gastric (Stomach) Cancer, Gastrointestinal Carcinoid Tumor, Gestational Trophoblastic Tumor, Glioma, Hairy Cell Leukemia, Head and Neck Cancer, Hepatocellular (Liver) Cancer, Hodgkin's Lymphoma, Hypopharyngeal Cancer, Hypothalamic and Visual Pathway Glioma (such as Childhood Hypothalamic and Visual Pathway Glioma), Intraocular Melanoma, Islet Cell Carcinoma (Endocrine Pancreas), Kaposi's Sarcoma, Kidney (Renal Cell) Cancer, Laryngeal Cancer, Lip and Oral Cavity Cancer, Lung Cancer (Non-Small Cell or Small Cell), Lymphoma (such as AIDS-Related Lymphoma, Burkitt's Lymphoma, Cutaneous T-Cell Lymphoma, Non-Hodgkin's Lymphoma), Macroglobulinemia (such as Waldenstrom's Macroglobulinemia), Malignant Fibrous Histiocytoma of Bone/Osteosarcoma, Medulloblastoma (such as Childhood Medulloblastoma), Melanoma, Merkel Cell Carcinoma, Mesothelioma (such as Adult Malignant Mesothelioma or childhood Mesothelioma), Metastatic Squamous Neck Cancer with Occult Primary, Multiple Endocrine Neoplasia Syndrome (such as occurring in childhood), Multiple Myeloma/Plasma Cell Neoplasm, Mycosis Fungoides, Myelodysplastic Syndromes, Myelodysplastic/Myeloproliferative Diseases, Myeloma (such as Multiple Myeloma), Chronic myeloproliferative disorders, Nasal Cavity and Paranasal Sinus Cancer, Nasopharyngeal Cancer, Nasopharyngeal Cancer (such as Childhood Nasopharyngeal Cancer), Neuroblastoma, Oropharyngeal Cancer, Osteosarcoma/Malignant Fibrous Histiocytoma of Bone, Ovarian Cancer (such as Childhood Ovarian Cancer), Ovarian Epithelial Cancer, Ovarian Germ Cell Tumor, Ovarian Low Malignant Potential Tumor, Pancreatic Cancer, Pancreatic Cancer, Paranasal Sinus and Nasal Cavity Cancer, Parathyroid Cancer, Penile Cancer, Pheochromocytoma, Pineoblastoma and Supratentorial Primitive Neuroectodermal Tumors, Pituitary Tumor, Pleuropulmonary Blastoma, Prostate Cancer, Renal Pelvis and Ureter Transitional Cell Cancer, Retinoblastoma, Rhabdomyosarcoma (such as Childhood Rhabdomyosarcoma), Salivary Gland Cancer, Adult-onset soft tissue Sarcoma, Soft Tissue Sarcoma (such as Childhood Soft Tissue Sarcoma), uterine Sarcoma, Sezary Syndrome, Skin Cancer (such as non-Melanoma skin cancer), Merkel Cell Skin Carcinoma, Small Intestine Cancer, Supratentorial Primitive Neuroectodermal Tumors (such as occurring in Childhood), Cutaneous T-Cell Lymphoma, Testicular Cancer, Thymoma and Thymic Carcinoma, Thyroid Cancer, Transitional Cell Cancer of the Renal Pelvis and Ureter, Trophoblastic Tumor (such as Gestational Trophoblastic Tumor), Urethral Cancer, Endometrial uterine cancer, Uterine Sarcoma, Vaginal Cancer, Visual Pathway and Hypothalamic Glioma (such as Childhood Visual Pathway and Hypothalamic Glioma), Waldenstrom's Macroglobulinemia and Wilms' Tumor.

1413. The method for vaccination according to any of claims 1293-1412, wherein the vaccination is for treatment of one or more diseases selected from the group consisting of diseases of inflammatory, auto-immune, allergic, viral, cancerous, infectious, allo- or xenogene (graft versus host and host versus graft) origin.

1414. The method for vaccination according to any of claims 1293-1413, wherein the vaccination is for treatment of one or more diseases selected from the group consisting of chronic inflammatory bowel disease such as Crohn's disease or ulcerative colitis, sclerosis, type I diabetes, rheumatoid arthritis, psoriasis, atopic dermatitis, asthma, malignant melanoma, renal carcinoma, breast cancer, lung cancer, cancer of the uterus, prostatic cancer, brain cancer, head and neck cancer, leukaemia, cutaneous lymphoma, hepatic carcinoma, colorectal cancer, bladder cancer, rejection-related disease, Graft-versus-host-related disease, or a viral disease associated with hepatitis, AIDS, measles, pox chicken pox, rubella or herpes.

1415. The method for vaccination according to any of claims 1293-1414, wherein the vaccination is for treatment of one or more diseases selected from the group consisting of a disease of inflammatory/auto-immune origin, including asthma, hypersensitivity pneumonitis, interstitial lung disease, sarcoidosis, idiopathic pulmonary fibrosis, interstitial lung disease associated with Crohn s Disease or ulcerative colitis or Whipple's disease, interstitial lung disease associated with Wegeners granulomatosis or hypersensitivity vasculitis, vasculitis syndromes, Hennoch-Schonleins purpura, Goodpastures syndrome, Wegeners granulomatosis, renal diseases such as antibody mediated glomerulopathia as in acute glomerulonephritis, nephritis associated with systemic lupus erythematosus, nephritis associated with other systemic diseases such as Wegeners granulomatosis and Goodpastures syndrome and mixed connective tissue disease, chronic interstitial nephritis, chronic glomerulonephritis, gastrointestinal diseases such as Crohn s Disease, Ulcerative colitis, coeliac disease, Whipple's disease, collagenous colitis, eosinophilic colitis, lymphatic colitis, hepatobiliary diseases such as auto-immune hepatitis, alcohol induced hepatitis, periportal fibrosis, primary biliary cirrhosis, sclerosing cholangitis, disorders of the central or peripheral nervous system such as demyelinating disease as multiple sclerosis, acute disseminated encephalomyelitis, sub-acute sclerosing panencephalitis, skin disease such as psoriasis, atopic dermatitis, eczema, allergic skin disease, progressive systemic sclerosis (scleroderma), exfoliating dermatitis, pemphigus vulgaris, joint diseases such as rheumatoid arthritis, ankylosing spondylitis, arthritis associated with psoriasis or inflammatory bowel disease, muscoloskelletal diseases such as myasthenia gravis, polymyositis, endocrine diseases such as insulin dependent diabetes mellitus, auto-immune thyroiditis (Hashimoto), thyreotoxicosis, Graves, diseases of the hematopoetic system such as auto-immune anaemia, auto-immune thrombocytopenia, cardiovascular diseases such as cardiomyopathia, vasculitis, cardiovascular disease associated with systemic diseases as systemic lupus erythematosus, polyarthritis nodosa, rheumatoid arthritis, scleroderma, sarcoidosis, diseases of cancerous origin, including malignant melanoma, Sezary's syndrome, cutaneous T-cell lymphoma, renal cell carcinoma, colorectal cancer, breast cancer, ovarian cancer, cancer of the uterus, prostatic cancer, hepatic carcinoma, lung cancer, and sarcoma, and diseases, disorders or conditions of allergic origin.

1416. The method for vaccination according to any of claims 1293-1415, wherein the vaccination is for treatment of one or more diseases selected from the group consisting of autoimmune diseases including multiple sclerosis, type I diabetes mellitus, Hashimotos thyroiditis, pernicious anemia, Addison's disease, myasthenia gravis, rheumatoid arthritis, uveitis, psoriasis, Guillain-Barre Syndrome and Grave's disease, systemic lupus erythematosus and dermatomyositis.

1417. The method for vaccination according to any of claims 1293-1416, wherein the vaccination is for treatment of one or more diseases selected from the group consisting of hypersensitivity disorders like asthma, eczema, atopical dermatitis, contact dermatitis, other eczematous dermatitides, seborrheic dermatitis, rhinitis, Lichen planus, Pemplugus, bullous Pemphigoid, Epidermolysis bullosa, uritcaris, angioedemas, vasculitides, erythemas, cutaneous eosinophilias, Alopecia greata, atherosclerosis, primary biliary cirrhosis and nephrotic syndrome.

1418. The method for vaccination according to any of claims 1293-1417, wherein the vaccination is for treatment of one or more diseases selected from the group consisting of intestinal inflammations, such as Coeliac disease, proctitis, eosinophilia gastroenteritis, mastocytosis, inflammatory bowel disease, Chrohn's disease and ulcerative colitis, as well as food-related allergies.

1419. The method for vaccination according to any of claims 1293-1418, wherein the vaccination is for treatment of one or more allergic diseases.

1420. The method for vaccination according to claim 1419, wherein the allergic diseases involve one or more of the allergens selected from the group consisting of inhalation allergens originating i. a. from trees, grasses, herbs, fungi, house dust mites, storage mites, cockroaches and animal hair, feathers, and dandruff, pollen allergens from trees, grasses and herbs are such originating from the taxonomic orders of Fagales, Oleales and Pinales including i. a. birch (Betula), alder (Alnus), hazel (Corylus), hornbeam (Carpinus) and olive (Olea), the order of Poales including i. a. grasses of the genera Lolium, Phleum, Poa, Cynodon, Dactylis and Secale, the orders of Astrales and Urticales including i. a. herbs of the genera Ambrosia and Artemisia, inhalation allergens from fungi, allergens originating from the genera Alternaria and Cladosporium, inhalation allergens from house dust mites of the genus Dermatophagoides, storage mites from the genus Lepidoglyphys destructor, those from cockroaches and those from mammals such as cat, dog, horse, cow, and bird.

1421. The method for vaccination according to any of claims 1293-1420, wherein the vaccination is for treatment of one or more diseases selected from the group consisting of Bet v 1 (B. verrucosa, birch), Aln g 1 (Alnus glutinosa, alder), Cor a 1 (Corylus avelana, hazel) and Car b 1 (Carpinus betulus, hornbeam) of the Fagales order, Cry j 1 (Pinales), Amb a 1 and 2, Art v 1 (Asterales), Par j 1 (Urticales), Ole e 1 (Oleaves), Ave e 1, Cyn d 1, Dac g 1, Fes p 1, Hol 1 1, Lol p 1 and 5, Pas n 1, Phl p 1 and 5, Poa p 1, 2 and 5, Sec c 1 and 5, and Sor h 1 (various grass pollens), Alt a 1 and Cla h 1 (fungi), Der f 1 and 2, Der p 1 and 2 (house dust mites, D. farinae and D. pteronyssinus, respectively), Lep d 1, Bla g 1 and 2, Per a 1 (cockroaches, Blatella germanica and Periplaneta americana, respectively), Fel d 1 (cat), Can f 1 (dog), Equ c 1, 2 and 3 (horse), Apis m 1 and 2 (honeybee), Ves g 1, 2 and 5, Pol a 1, 2 and 5 (all wasps) and Sol i 1, 2, 3 and 4 (fire ant).

1422. The method for vaccination according to any of claims 1293-1421, wherein the vaccination results in up-regulation of the immune response of said individual.

1423. The method for vaccination according to any of claims 1293-1422, wherein the vaccination results in down-regulation of the immune response of said individual.

1424. The method for vaccination according to any of claims 1293-1423, wherein the vaccination results in modulation of the immune response of said individual.

1425. The method for vaccination according to any of claims 1293-1424, wherein the vaccination results in stimulation of the immune response of said individual.

1426. The method for vaccination according to any of claims 1293-1425, wherein the vaccination results in inhibition of the immune response of said individual.

1427. The method for vaccination according to any of claims 1293-1426, wherein the vaccination results in restoration of the immune response of said individual.

1428. The method for vaccination according to any of claims 1293-1427, wherein the vaccination results in induction of anergy in a cell.

1429. The method for vaccination according to any of claims 1293-1428, wherein the vaccination results in adoptive immunotherapy.

1430. The method for vaccination according to any of claims 1293-1429, wherein the vaccination comprises in vivo therapy and/or ex vivo therapy.

1431. The method for vaccination according to any of claims 1293-1430, wherein the vaccination comprises combination therapy such as co-administration of the composition according to claims 1-1291 and one or more medicaments.

1432. The method for vaccination according to claim 1431, wherein the co-administration comprises that the composition according to claims 1-1291 and the one or more medicaments can be administered simultaneously.

1433. The method for vaccination according to claim 1431, wherein the co-administration comprises that the composition according to claims 1-1291 and the one or more medicaments can be administered sequentially in any order.

1434. The method for vaccination according to claim 1431, wherein the one or more medicaments can be an anti-cancer medicament.

1435. The method for vaccination according to claim 1431, wherein the one or more medicaments can be an anti-HIV medicament.

1436. The method for vaccination according to claim 1431, wherein the one or more medicaments can be a chemotherapeutic agent.

1437. The method for vaccination according to claim 1431, wherein the one or more medicaments can be an immunotherapeutic agent.

1438. The method for vaccination according to claim 1431, wherein the combination therapy comprises radiation therapy.

1439. The method for vaccination according to claim 1431, wherein the combination therapy comprises gene therapy.

1440. The method for vaccination according to claim 1431, wherein the combination therapy comprises surgery.

1441. The method for vaccination according to claim 1431, wherein the one or more medicaments can be selected from the group of chemotherapeutic agents including methotrexate, vincristine, adriamycin, cisplatin, non-sugar containing chloroethylnitrosoureas, 5-fluorouracil, mitomycin C, bleomycin, doxorubicin, dacarbazine, taxol, fragyline, Meglamine GLA, valrubicin, carmustaine and poliferposan, MM1270, BAY 12-9566, RAS farnesyl transferase inhibitor, farnesyl transferase inhibitor, MMP, MTA/LY231514, LY264618/Lometexol, Glamolec, CI-994, TNP-470, Hycamtin/Topotecan, PKC412, Valspodar/PSC833, Novantrone/Mitroxantrone, Metaret/Suramin, Batimastat, E7070, BCH-4556, CS-682, 9-AC, AG3340, AG3433, Incel/VX-710, VX-853, ZD0101, ISI641, ODN 698, TA 2516/Marmistat, BB2516/Marmistat, CDP 845, D2163, PD183805, DX8951f, Lemonal DP 2202, FK 317, Picibanil/OK-432, AD 32/Valrubicin, Metastron/strontium derivative, Temodal/Temozolomide, Evacet/liposomal doxorubicin, Yewtaxan/Placlitaxel, Taxol/Paclitaxel, Xeload/Capecitabine, Furtulon/Doxifluridine, Cyclopax/oral paclitaxel, Oral Taxoid, SPU-077/Cisplatin, HMR 1275/Flavopiridol, CP-358 (774)/EGFR, CP-609 (754)/RAS oncogene inhibitor, BMS-182751/oral platinum, UFT (Tegafur/Uracil), Ergamisol/Levamisole, Eniluracil/776C85/5FU enhancer, Campto/Levamisole, Camptosar/Irinotecan, Tumodex/Ralitrexed, Leustatin/Cladribine, Paxex/Paclitaxel, Doxil/liposomal doxorubicin, Caelyx/liposomal doxorubicin, Fludara/Fludarabine, Pharmarubicin/Epirubicin, DepoCyt, ZD1839, LU 79553/Bis-Naphtalimide, LU 103793/Dolastain, Caetyx/liposomal doxorubicin, Gemzar/Gemcitabine, ZD 0473/Anormed, YM 116, Iodine seeds, CDK4 and CDK2 inhibitors, PARP inhibitors, D4809/Dexifosamide, Ifes/Mesnex/Ifosamide, Vumon/Teniposide, Paraplatin/Carboplatin, Plantinol/cisplatin, Vepeside/Etoposide, ZD 9331, Taxotere/Docetaxel, prodrug of guanine arabinoside, Taxane Analog, nitrosoureas, alkylating agents such as melphelan and cyclophosphamide, Aminoglutethimide, Asparaginase, Busulfan, Carboplatin, Chlorombucil, Cytarabine HCl, Dactinomycin, Daunorubicin HCl, Estramustine phosphate sodium, Etoposide (VP16-213), Floxuridine, Fluorouracil (5-FU), Flutamide, Hydroxyurea (hydroxycarbamide), Ifosfamide, Interferon Alfa-2a, Alfa-2b, Leuprolide acetate (LHRH-releasing factor analogue), Lomustine (CCNU), Mechlorethamine HCl (nitrogen mustard), Mercaptopurine, Mesna, Mitotane (o.p′-DDD), Mitoxantrone HCl, Octreotide, Plicamycin, Procarbazine HCl, Streptozocin, Tamoxifen citrate, Thioguanine, Thiotepa, Vinblastine sulfate, Amsacrine (m-AMSA), Azacitidine, Erthropoietin, Hexamethylmelamine (HMM), Interleukin 2, Mitoguazone (methyl-GAG; methyl glyoxal bis-guanylhydrazone; MGBG), Pentostatin (2′deoxycoformycin), Semustine (methyl-CCNU), Teniposide (VM-26) and Vindesine sulfate.

1442. The method for vaccination according to claim 1431, wherein the one or more medicaments can be selected from the group of anti-cancer drugs consisting of Aldesleukin/Proleukin (Chiron Corp), Alemtuzumab/Campath (Millennium and ILEX Partners, LP), alitretinoin/Panretin (Ligand Pharmaceuticals), allopurinol/Zyloprim (GlaxoSmithKline), altretamine/Hexylen (US Bioscience), amifostine/Ethyol (US Bioscience), anastrozole/Arimidex (AstraZeneca), arsenic trioxide/Trisenox (Cell Therapeutic), Asparaginase/Elspar (Merck & Co, Inc), BCG Live/TICE BCG (Organon Teknika Corp), bexarotene capsules/Targretin (Ligand Pharmaceuticals), bleomycin/Blenoxane (Bristol-Myers Squibb), busulfan/Busulfex (GlaxoSmithKline), calusterone/Methosarb (Pharmacia & Upjohn Company), capecitabine/Xeloda (Roche), carboplatin/Paraplatin (Bristol-Myers Squibb), carmustine/BCNU, BiCNU (Bristol-Myers Squibb), carmustine with Polifeprosan 20 Implant/Gliadel Wafer (Guilford Pharmaceuticals Inc.), celecoxib/Celebrex (Searle), chlorambucil/Leukeran (GlaxoSmithKline), cisplatin/Platinol (Bristol-Myers Squibb), cladribine/Leustatin, 2-CdA (R.W. Johnson Pharmaceutical Research Institute), cyclophosphamide Cytoxan/Neosar (Bristol-Myers Squibb), cytarabine/Cytosar-U (Pharmacia & Upjohn Company), dacarbazine/DTIC-Dome (Bayer), dactinomycin/actinomycin D Cosmegen (Merck), Darbepoetin alfa/Aranesp (Amgen, Inc), daunorubicin/daunomycin/Daunorubicin (Bedford Labs), daunorubicin/daunomycin/Cerubidine (Wyeth Ayerst), Denileukin/diftitox/Ontak (Seragen, Inc), dexrazoxane/Zinecard (Pharmacia & Upjohn Company), docetaxel/Taxotere (Aventis Pharmaceutical), doxorubicin Adriamycin/Rubex (Pharmacia & Upjohn Company), DROMOSTANOLONE PROPIONATE/MASTERONE INJECTION(SYNTEX), Elliott's B Solution (Orphan Medical, Inc), epirubicin/Ellence (Pharmacia & Upjohn Company), etoposide phosphate (Bristol-Myers Squibb), etoposide/VP-16/Vepesid (Bristol-Myers Squibb), exemestane/Aromasin (Pharmacia & Upjohn Company), Filgrastim/Neupogen (Amgen, Inc), floxuridine/FUDR (Roche), fludarabine/Fludara (Berlex Laboratories Inc.), fluorouracil/5-FU/Adrucil (ICN Puerto Rico), fulvestrant/Faslodex (IPR), gemcitabine/Gemzar (Eli Lilly), gemtuzumab/ozogamicin/Mylotarg (Wyeth Ayerst), goserelin acetate/Zoladex Implant (AstraZeneca Pharmaceuticals), hydroxyurea/Hydrea (Bristol-Myers Squibb), Ibritumomab Tiuxetan/Zevalin (IDEC Pharmaceuticals Corp), idarubicin/Idamycin (Adria Laboratories), ifosfamide/IFEX (Bristol-Myers Squibb), imatinib mesylate/Gleevec (Novartis), Interferon alfa-2a/Roferon-A (Hoffmann-La Roche Inc), Interferon alfa-2b/Intron A (Schering Corp), irinotecan/Camptosar (Pharmacia & Upjohn Company), letrozole/Femara (Novartis), leucovorin Wellcovorin/Leucovorin (Immunex Corporation), levamisole/Ergamisol (Janssen Research Foundation), lomustine/CCNU/CeeBU (Bristol-Myers Squibb), mechlorethamine/nitrogen mustard/Mustargen (Merck), megestrol acetate/Megace (Bristol-Myers Squibb), melphalan/L-PAM/Alkeran (GlaxoSmithKline), mercaptopurine/6-MP Purinethol (GlaxoSmithKline), mesna/Mesnex (Asta Medica), methotrexate (Lederle Laboratories), methoxsalen/Uvadex (Therakos), mitomycin C/Mutamycin (Bristol-Myers Squibb), mitomycin C/Mitozytrex (Supergen), mitotane/Lysodren (Bristol-Myers Squibb), mitoxantrone/Novantrone (Lederle Laboratories), nandrolone phenpropionate/Durabolin-50 (Organon), Nofetumomab/Verluma (Boehringer Ingelheim Pharma KG (formerly Dr. Karl Thomae GmbH)), Oprelvekin/Neumega (Genetics Institute), oxaliplatin/Eloxatin (Sanofi Synthelabo), paclitaxel/Taxol (Bristol-Myers Squibb), pamidronate/Aredia (Novartis), pegademase/Adagen (Pegademase Bovine) (Enzon), Pegaspargase/Oncaspar (Enzon, Inc), Pegfilgrastim/Neulasta (Amgen, Inc), pentostatin/Nipent (Parke-Davis Pharmaceutical Co.), pipobroman/Vercyte (Abbott Labs), plicamycin/mithramycin/Mithracin (Pfizer Labs), porfimer sodium/Photofrin (QLT Phototherapeutics Inc.), procarbazine/Matulane (Sigma Tau Pharms), quinacrine/Atabrine (Abbott Labs), Rasburicase/Elitek (Sanofi-Synthelabo, Inc), Rituximab/Rituxan (Genentech, Inc), Sargramostim/Prokine (Immunex Corp), streptozocin/Zanosar (Pharmacia & Upjohn Company), talc/Sclerosol (Bryan), tamoxifen/Nolvadex (AstraZeneca Pharmaceuticals), temozolomide/Temodar (Schering), teniposide/VM-26/Vumon (Bristol-Myers Squibb), testolactone/Teslac (Bristol-Myers Squibb), thioguanine/6-TG/Thioguanine (GlaxoSmithKline), thiotepa/Thioplex (Lederle Laboratories), topotecan/Hycamtin (GlaxoSmithKline), topotecan/Hycamtin (GlaxoSmithKline), toremifene/Fareston (Orion Corp), Tositumomab/Bexxar (Corixa Corporation), Trastuzumab/Herceptin (Genentech, Inc), tretinoin/ATRA/Vesanoid (Roche), Uracil Mustard (Roberts Labs), valrubicin/Valstar (Medeva), vinblastine/Velban (Eli Lilly), vincristine/Oncovin (Eli Lilly), vinorelbine/Navelbine (GlaxoSmithKline), and zoledronate/Zometa (Novartis).

1443. The method for vaccination according to claim 1431, wherein the one or more medicaments can be selected from the group of the immunotherapeutic agents comprising Ributaxin, Herceptin, Quadramet, Panorex, IDEC-Y2B8, BEC2, C225, Oncolym, SMART MI 95, ATRAGEN, Ovarex, Bexxar, LDP-03, ior t6, MDX-210, MDX-11, MDX-22, OV103, 3622W94, anti-VEGF, Zenapax, MDX-220, MDX-447, MELIMMUNE-2, MELIMMUNE-1, CEACIDE, Pretarget, NovoMAb-G2, TNT, Gliomab-H, GNI-250, EMD-72000, LymphoCide, CMA 676, Monopharm-C, 4B5, ior egf.r3, ior c5, BABS, anti-FLK-2, MDX-260, ANA Ab, SMART 1D10 Ab, SMART ABL 364 Ab and ImmuRAIT-CEA, a cytokine or an interferon.

1444. The method for vaccination according to claim 1431, wherein the one or more medicaments can be an antiviral drug such as a Nucleoside/Nucleotide Reverse Transcriptase Inhibitor.

1445. The method for vaccination according to claim 1431, wherein the one or more medicaments can be an antiviral drug such as Non-Nucleoside Reverse Transcriptase Inhibitors.

1446. The method for vaccination according to claim 1431, wherein the one or more medicaments can be a Protease Inhibitor.

1447. The method for vaccination according to claim 1431, wherein the one or more medicaments can be a Fusion or Entry Inhibitor.

1448. The method for vaccination according to claim 1431, wherein the one or more medicaments can be an Integrase Inhibitor.

1449. The method for vaccination according to claim 1431, wherein the one or more medicaments can be selected from the group consisting of lamivudine, Epivir, abacavir, Ziagen, AZT or ZDV, Zidovudine, Retrovir, d4T, Stavudine, Zerit, ddC, Zalcitabine, Hivid, ddI, didanosine, Videx (tablet), Videx EC (capsule), FTC, emtricitabine, Emtriva, TDF, tenofovir, Viread, Epzicom, Kivexa, Trizivir, Combivir, Truvada, Delavirdine, Rescriptor, Efavirenz, Sustiva, Stocrin, Etravirine, Intelence, Nevirapine, Viramune, amprenavir, Agenerase, fosamprenavir, Lexiva, Telzir, Atazanavir, Reyataz, Darunavir, Prezista, Indinavir, Crixivan, lopinavir, ritonavir, Kaletra, Aluvia, nelfinavir, Viracept, ritonavir, Norvir, saquinavir, Fortovase, Invirase, Tipranavir, Aptivus, Enfuvirtide, Fuzeon, maraviroc, Celsentri, Selzentry, raltegravir, Isentress, Atripla, Atazanavir/r, Darunavir/r, Raltegravir, Maraviroc, and Etravirine.

1450. A kit-of-parts comprising the composition according to any of claims 1-1291 and at least one addition component.

1451. Use of the kit-of-parts according to claim 1450 for vaccination of an individual in need thereof.

1452. Use of the kit-of-parts according to claim 1450 for vaccination of an individual in need thereof according to the method of any of claims 1293-1449.

1-1452. (canceled)

1453. A composition comprising one or more pharmamers.

1454. The composition according to claim 1453, wherein the composition is a composition for vaccination.

1455. The composition according to claim 1453, wherein the one or more pharmamers comprise one or more biologically active molecules.

1456. The composition according to claim 1455, wherein the one or more biologically active molecules comprise one or more MHC multimers.

1457. The composition according to claim 1456, wherein the one or more MHC multimers comprise a MHC multimer comprising (a-b-P)ₙ,
wherein n>1,
wherein a and b together form a functional MHC protein capable of binding the peptide P, when P is present,
wherein (a-b-P) is the MHC-peptide complex formed when the peptide P binds to the functional MHC protein,
wherein each MHC peptide complex is associated with one or more multimerization domains.

1458. The composition according to claim 1453, wherein the one or more pharmamers comprise one or more multimerization domain(s).

1459. The composition according to claim 1453, wherein the composition comprises one or more vaccine adjuvant(s).

1460. The composition according to claim 1453, wherein the composition further comprises one or more living virulent organism(s).

1461. A method for vaccination comprising administration to an individual in need thereof an effective amount of the composition according to claim 1453.

1462. A kit-of-parts comprising the composition according to claim 1453 and at least one additional component.

1463. Use of the kit-of-parts according to claim 1462 for vaccination of an individual in need thereof.
